(19) United States
(12) Patent Application Publication
(10) Pub. No.: US 2018/0282809 A1
(43) Pub. Date: Oct. 4, 2018

(54) A METHOD FOR DIAGNOSING A DISEASE BY DETECTION OF circRNA IN BODILY FLUIDS

(71) Applicant: MAX-DELBRÜCK-CENTRUM FÜR MOLEKULARE MEDIZIN IN DER HELMHOLTZ-GEMEINSCHAFT, BERLIN (DE)

(72) Inventors: NIKOLAUS RAJEWSKY, BERLIN (DE); SEBASTIAN MEMCZAK, BERLIN (DE); PANAGIOTIS PAPAVASILEIOU, BIELEFELD (DE)

(21) Appl. No.: 15/763,870

(22) PCT Filed: Sep. 29, 2016
(86) PCT No.: PCT/EP2016/073321

§ 371 Date: Mar. 28, 2018

(30) Foreign Application Priority Data
Sep. 29, 2015 (EP) 15187446.8

(51) Int. Cl. C12Q 1/6883

(52) U.S. Cl. CPC C12Q 1/6883; C12Q 2600/158

(57) ABSTRACT

The present application relates to a method for diagnosing a disease of a subject, comprising the step of determining the presence or absence of one or more circular RNA (circRNA) in a sample of a bodily fluid of said subject; wherein the presence or absence of said one or more circRNA is indicative for the disease. In particular the application relates to a method for diagnosing the neurodegenerative disease, preferably Alzheimer's disease, in a subject comprises the steps of —determining the level of one or more circRNA in a sample of a bodily fluid of said subject; —comparing the determined level to a control level of said one or more circRNA; wherein differing levels between the determined and the control level are indicative for the disease. Furthermore, the application relates to means for detecting circRNAs being a biomarker for a neurodegenerative disease and kits and array comprising nucleic acid probes for detecting exon-exon junctions in a head to tail arrangement of these circRNAs.

### TECHNICAL FIELD OF THE INVENTION

[0001] The present invention relates to the field of medicine and RNA biology, in particular it relates to the field of diagnosis of a disease using circRNAs, more particular the present invention relates to the field of diagnosis of a neurodegenerative disease, e.g. Alzheimer's disease.

### BACKGROUND OF THE INVENTION

[0002] Many diseases are associated with deregulation of gene expression. Such deregulation is in many cases detectable at early stages of the disease. In fact, detection of deregulated expression often serves as a biomarker for a disease or the risk for acquiring a disease before the disease manifests in terms of symptoms. However, diagnosis is often restricted to samples of the diseased tissue. In some cases, diagnosis also aims at the detection of biomarkers in easily accessible samples, such as blood. However, these methods are restricted to protein biomarkers and require cumbersome preparation of the samples, e.g. serum or plasma samples. The direct readout of expression, i.e. RNA, is in most cases not feasible in blood samples, as RNAs are prone to degradation. Hence, RNA nowadays is a poor biomarker in blood, in particular for diseases manifesting in tissues others than blood.

[0003] Regulatory RNAs such as microRNAs (miRNAs) or long non-coding RNAs (lncRNAs) have been implicated in many biological processes and human diseases such as cancer (reviewed in Batista P J, Chang H Y. Long Noncoding RNAs: Cellular Address Codes in Development and Disease. Cell. 2013; 152(6):1298-1307; and Cech T R, Steitz J A. The Noncoding RNA Revolution Trashing Old Rules to Forge New Ones. Cell. 2014; 157(1):77-94). Recent studies have drawn attention to a new class of RNA that is endogenously expressed as single-stranded, covalently closed circular molecules (circRNA, reviewed in Jeck W R, Sharpless N E. Detecting and characterizing circular RNAs. Nature Biotechnology. 2014; 32(5):453-461). Most circRNAs are probably products of a ‘back-splice’ reaction that joins a splice donor site with an upstream splice acceptor site (see Ashwal-Fluss R, Meyer M, Pamudurti N R, et al. circRNA Biogenesis Competes with Pre-mRNA Splicing. MOLCEL. 2014; 1-12; and Starke S, Jost I, Rossbach O, et al. Exon Circularization Requires Canonical Splice Signals. Cell Reports. 2015; 10(1):103-111). Circular RNA is known for several decades from viroids, viruses and plants, but until recently only few mammalian circRNAs were reported. Sequencing based studies lately revealed that circRNAs are abundantly and prevalently expressed across life, oftentimes in a tissue and developmental-stage specific manner (see Danan M, Schwartz S, Edelheit S, Sorek R. Transcriptome-wide discovery of circular RNAs in Archaea. Nucleic Acids Res. 2012; 40(7):3131-3142; Salzman J, Gawad C, Wang P L, Lacayo N, Brown P O. Circular RNAs are the predominant transcript isoform from hundreds of human genes in diverse cell types. PLoS ONE. 2012; 7(2):e30733; Jeck W R, Sorrentino J A, Wang K, et al. Circular RNAs are abundant, conserved, and associated with ALU repeats. RNA. 2013; 19(2):141-157; Memczak S, Jens M, Elefsinioti A, et al. Circular RNAs are a large class of animal RNAs with regulatory potency. Nature. 2013; 495(7441):333-338; Salzman J, Chen R E, Olsen M N, Wang P L, Brown P O. Cell-Type Specific Features of Circular RNA Expression. PLoS Genetics. 2013; 9(9):e1003777; Wang P L, Bao Y, Yee M-C, et al. Circular RNA is expressed across the eukaryotic tree of life. PLoS ONE. 2014; 9(3):e90859; Guo J U, Agarwal V, Guo H, Bartel D P. Expanded identification and characterization of mammalian circular RNAs. Genome Biology. 2014; 1-14; and You X, Vlatkovic I, Babic A, et al. Neural circular RNAs are derived from synaptic genes and regulated by development and plasticity. Nat Neurosci. 20117-25). The vast majority of circRNAs consists of 2-4 exons of protein coding genes, but they can also derive from intronic, non-coding, antisense, 5′ or 3′ untranslated or intergenic genomic regions (see Memczak S, Jens M, Elefsinioti A, et al. Circular RNAs are a large class of animal RNAs with regulatory potency. Nature. 2013; 495(7441):333-338; and Zhang Y, Zhang X-O, Chen T, et al. Circular Intronic Long Noncoding RNAs. MOLCEL. 2013; 1-15). Although not fully understood, the biogenesis of many mammalian circRNAs depends on complementary sequences within flanking introns (see Ashwal-Fluss R, Meyer M, Pamudurti N R, et al. circRNA Biogenesis Competes with Pre-mRNA Splicing. MOLCEL. 2014; 1-12; Rybak-Wolf A, Stottmeister C, Glažar P, et al. Circular RNAs in the Mammalian Brain Are Highly Abundant, Conserved, and Dynamically Expressed. MOLCEL. 2015; 1-17; Zhang X-O, Wang H-B, Zhang Y, et al. Complementary Sequence-Mediated Exon Circularization. Cell. 2014; Liang D, Wilusz J E. Short intronic repeat sequences facilitate circular RNA production. Genes and Development. 2014; Conn S J, Pillman K A, Toubia J, et al. The RNA Binding Protein Quaking Regulates Formation of circRNAs. Cell. 2015; 160(6):1125-1134; and Ivanov A, Memczak S, Wyler E, et al. Analysis of Intron Sequences Reveals Hallmarks of Circular RNA Biogenesis in Animals. CellReports. 2015; 10(2):170-177) and their expression can be modulated by antagonistic or activating trans-acting factors such as ADAR and Quaking (see Ivanov A, Memczak S, Wyler E, et al. Analysis of Intron Sequences Reveals Hallmarks of Circular RNA Biogenesis in Animals. Cell Reports. 2015; 10(2):170-177; and Conn S J, Pillman K A, Toubia J, et al. The RNA Binding Protein Quaking Regulates Formation of circRNAs. Cell. 2015; 160(6):1125-1134; respectively). Although the function of animal circRNAs is largely unknown, it was demonstrated that the circRNAs CDR1as (ciRS-7) and SRY can act as antagonists of specific miRNAs by functioning as miRNA sponges (see Memczak S, Jens M, Elefsinioti A, et al. Circular RNAs are a large class of animal RNAs with regulatory potency. Nature. 2013; 495(7441):333-338; and Hansen T B, Jensen T I, Clausen B H, et al. Natural RNA circles function as efficient microRNA sponges. Nature. 2013; 495(7441):384-388). Moreover, stable knockdown of CDR1as caused a migration defect in cell culture and a circRNA produced from the muscleblind transcript can bind muscleblind protein and likely regulate its expression levels (see Memczak S, Jens M, Elefsinioti A, et al. Circular RNAs are a large class of animal RNAs with regulatory potency. Nature. 2013; 495(7441):333-338; and Ashwal-Fluss R, Meyer M, Pamudurti N R, et al. circRNA Biogenesis Competes with Pre-mRNA Splicing. MOLCEL. 2014; 1-12). Besides these specific functions for the few in-depth analyzed circRNAs, a recent study uncovered a putatively more general competition mechanism between linear RNA splicing and co-transcriptional circular RNA splicing (see Ashwal-Fluss R, Meyer M, Pamudurti N R, et al. circRNA Biogenesis Competes with Pre-mRNA Splicing. MOLCEL. 2014; 1-12). The lack of free ends, i.e. its circularity, renders circRNAs resistant to exonucleolytic activities within cells and in extracellular environments. Thus, circRNAs are stable molecules as demonstrated by their long half lives in cells a feature that distinguishes them from canonical linear RNA isoforms (see Cocquerelle C, Daubersies P, Majérus MA, Kerckaert J P, Bailleul B. Splicing with inverted order of exons occurs proximal to large introns. EMBO J 1992; 11(3):1095-1098; Jeck W R, Sorrentino J A, Wang K, et al. Circular RNAs are abundant, conserved, and associated with ALU repeats. RNA. 2013; 19(2):141-157; and Memczak S, Jens M, Elefsinioti A, et al. Circular RNAs are a large class of animal RNAs with regulatory potency. Nature. 2013; 495(7441):333-338).

[0004] The inventors now for the first time show the presence of a plurality of ten thousands of circRNAs in standard clinical whole blood specimen of diseased subjects and thereby show that circRNAs function as biomarkers in human disorders, in particular neurodegenerative disorders, as exemplified by Alzheimer's disease. Strikingly, the mRNA transcripts which give rise to circRNAs were in hundreds of cases almost not detectable while the corresponding circRNAs were highly expressed, underlining the significance of circRNAs as novel biomarkers. Approaches have been performed to detect circRNAs as biomarkers in blood. However, these approaches use processed blood. Blood-exosomes have been postulated as comprising circRNAs (Li, Yan et al. (2015); Circular RNA is enriched and stable in exosomes: a promising biomarker for cancer diagnosis; Cell Res, 25(8): 981-984). However, blood-exosomes are difficultly obtainable and the cumbersome procedure renders the procedure susceptible to errors and the significance of the so obtained circRNA levels questionable. The present inventors however showed that circRNAs in unprocessed samples, e.g. whole blood, are detectable and are surprisingly well suited as biomarkers.

[0005] Alzheimer's disease (also referred to as “AD”), is the cause for 60% to 70% of cases of dementia. It is a chronic neurodegenerative disease starting slowly and getting worse over time. One of the first symptoms is a short-term memory loss. As the disease advances, symptoms can include problems with language, disorientation (including easily getting lost), mood swings, loss of motivation, not managing self care, and behavioural issues. As a person's condition declines, she or he often withdraws from family and society. Gradually, bodily functions are lost, ultimately leading to death. Although the speed of progression can vary, the average life expectancy following diagnosis is three to nine years. The cause of Alzheimer's disease is poorly understood. About 70% of the risk is believed to be genetic with many genes usually involved. Other risk factors include a history of head injuries, depression, or hypertension. The disease process is associated with plaques and tangles in the brain.

[0006] Currently, the diagnosis of Alzheimer's disease is based on the history of the illness and cognitive testing. These tests are often substituted by medical imaging and blood tests to rule out other possible causes. Initial symptoms are often mistaken for normal ageing. Today, examination of brain tissue is needed for a definite diagnosis. However, brain tissue is not easily accessible and the surgical intervention causes severe dangers. Mental and physical exercise, and avoiding obesity may decrease the risk of AD.

[0007] In 2010, there were between 21 and 35 million people worldwide with AD. It most often begins in people over 65 years of age, although 4% to 5% of cases are early-onset Alzheimer's which begin before this. It affects about 6% of people 65 years and older. In 2010, dementia resulted in about 486,000 deaths. In developed countries, AD is one of the most financially costly diseases. There is a long felt need for a direct, easy and reliable diagnosis of Alzheimer's disease to allow intervention and prevention of adverse effects of the beginning or progressing mental degeneration.

[0008] The molecular underpinnings of AD are controversially debated; although substantial research efforts were made and are currently ongoing (annual budget for AD of the NIH in 2015 is $566 million). In particular there is an urgent need for biomarkers for AD since it is believed that the molecular alterations involved in the disease precede the symptoms years or even decades, hindering therapeutic interventions.

### SUMMARY OF THE INVENTION

[0009] The present invention provides for a method that overcomes the above outlined drawbacks. The inventors have found that it is possible to detect circRNAs in samples of a bodily fluid in a great amount. The inventors further have proven that the circRNAs are indicative for a disease that is not a disease of the bodily fluid. Thereby, a tool is given to directly diagnose a disease by determining presence or absence of one or more circRNAs in a bodily fluid. The invention therefore provides for a new class of biomarkers in bodily fluids, e.g. blood.

[0010] Hence, the present invention relates to a method for diagnosing a disease of a subject, comprising the step of:
[0011] determining the presence or absence of one or more circular RNA (circRNA) in a sample of a bodily fluid of said subject;

[0012] wherein the presence or absence of said one or more circRNA is indicative for the disease. Preferably, said disease is not a disease of said bodily fluid.

[0013] As has been shown by the inventors, certain circRNAs may be present in samples of a diseased subject at differing levels as compared to samples from healthy subjects. Hence, it may be desirable to decide on “presence” or “absence” of a circRNA when compared to a control level. Hence, in a preferred embodiment of the method according to the present invention the determination step comprises:
[0014] determining the level of said one or more circRNA;
[0015] comparing the determined level to a control level of said one or more circRNA;

[0016] wherein differing levels between the determined and the control level are indicative for the disease. Hence, the invention also relates to a method for diagnosing a disease of a subject, comprising the step of:
[0017] determining the level of said one or more circRNA;
[0018] comparing the determined level to a control level of said one or more circRNA;

[0019] wherein differing levels between the determined and the control level are indicative for the disease.

[0020] In a preferred embodiment of the present invention, the method is a method for diagnosing a neurodegenerative disease in a subject. Hence, the invention also relates to a method for diagnosing the neurodegenerative disease, preferably Alzheimer's disease, in a subject comprising the steps of:
[0021] determining the level of one or more circRNA in a sample of a bodily fluid of said subject;
[0022] comparing the determined level to a control level of said one or more circRNA; wherein differing levels between the determined and the control level are indicative for the disease. A particular preferred neurodegenerative disease is Alzheimer's disease.

[0023] The inventors, furthermore, identified circRNAs that were not previously known to be present in blood. These novel blood circRNAs are listed in Table 1. Hence the present invention also relates to a nucleic acid probe specifically hybridizing to the sequence of nucleotide 11 to 30 of a sequence selected from the group consisting of SEQ ID NO:1 to 910, and a RNA sequence encoded by a sequence of SEQ ID NO:1 to 910, or specifically hybridizing to a reverse complement sequence thereof; preferably specifically hybridizing to a sequence selected from the group consisting of SEQ ID NO:1 to 910, and a RNA sequence encoded by a sequence of SEQ ID NO:1 to 910, or specifically hybridizing to a reverse complement sequence thereof.

[0024] Furthermore, the invention relates to a kit for diagnosing a neurodegenerative disease, comprising means for specifically detecting one or more nucleic acid sequence encoded by a sequence selected from the group consisting of SEQ ID NO:1 to 910 or SEQ ID NO:911 to SEQ ID NO:1820.

[0025] The invention, furthermore, provides an array for determining the presence or level of a plurality of nucleic acids, comprising a plurality of probes, wherein the plurality of probes specifically hybridize to the sequence of nucleotide 11 to 30 of a sequence selected from the group consisting of SEQ ID NO:1 to SEQ ID NO:910, and a RNA sequence encoded by a sequence of SEQ ID NO:1 to 910, or to a reverse complement sequence thereof; preferably the plurality of probes comprises probes specifically hybridizing to the sequence of nucleotide 11 to 30 of at least 100, preferably at least 150 more preferably at least 200 nucleic acid sequences selected from the group consisting of SEQ ID NO:1 to SEQ ID NO:910, and a RNA sequence encoded by a sequence of SEQ ID NO:1 to 910; or specifically hybridize to the reverse complement sequences thereof, preferably the plurality of probes comprises probes specifically hybridizing to the sequence of nucleotide 11 to 30 of SEQ ID NO:1 to SEQ ID NO:200, or a RNA sequence encoded by a sequence of SEQ ID NO:1 to 200, or the reverse complement sequences thereof.

[0026] The invention in particular relates to the use of a nucleic acid probe specifically hybridizing to the sequence of nucleotide 11 to 30 of a sequence selected from the group consisting of SEQ ID NO:1 to SEQ ID NO:910; and a RNA sequence encoded by a sequence of SEQ ID NO:1 to 910, or hybridizing to the reverse complement thereof, a kit according to the invention, or an array according to the invention for the diagnosis of a neurodegenerative disease, preferably for the diagnosis of Alzheimer's disease.

### FIGURE LEGENDS

[0027] FIG. 1: Thousands of circRNAs are reproducibly detected in human blood. (A) Total RNA was extracted from human whole blood samples and rRNA was depleted. cDNA libraries were synthesized using random primers and subjected to sequencing. Raw sequencing reads were used for circRNA detection as previously described (see Memczak S, Jens M, Elefsinioti A, et al. Circular RNAs are a large class of animal RNAs with regulatory potency. Nature. 2013; 495(7441):333-338). Sequencing reads that map continuously to the human reference genome were disregarded. From unmapped reads anchors were extracted and independently mapped. Anchors that align consecutively indicate linear splicing events 1) whereas alignment in reverse orientation indicates head-to-tail splicing as observed for circular RNAs 2). After filtering of linear splicing events and circRNA candidates (see Methods in the Example section) the genomic coordinates and additional information such as read count, alignment quality and annotation are documented (Table 3). (B) circRNA candidate expression in human whole blood samples from two donors, ECDF=empirical cumulative distribution function. circRNA candidates tested in this study are annotated as numbers. Right panel: mRNA and long, non-coding RNA (lncRNA) (n=17,282) expression per gene in two blood samples in transcripts per million (TPM), RNAs with putative circular isoforms (n=2,523) are highlighted in blue; R-values: Spearman correlation for RNAs found in both samples. (C) ENSEMBLE genome annotation for reproducibly detected circRNA candidates (see also FIG. 5). Number of circRNAs with at least one splice site in each category is given. (D) Number of distinct circRNA candidates per gene. y-axis=log₂(circRNA frequency+1). Gene names with the highest numbers are highlighted. (E) Expression level of top 8 circRNA candidates measured with sequencing (left panel) and divergent primers in qPCR (right); Ct=cycle threshold linear control genes VCL and TFRC were measured with convergent primer.

[0028] FIG. 2: Top expressed blood circRNAs dominate over linear RNA isoforms. (A) Example for the read coverage of a top expressed blood circRNA produced from the PCNT gene locus (http://genome.ucsc.edu; see Kent W J, Sugnet C W, Furey T S, et al. The human genome browser at UCSC. Genome Research. 2002; 12(6):996-1006). Data are shown for the human HEK293 cell line (see Ivanov A, Memczak S, Wyler E, et al. Analysis of Intron Sequences Reveals Hallmarks of Circular RNA Biogenesis in Animals. CellReports. 2015; 10(2):170-177) and two biologically independent blood RNA preparations. (B) Relative expression and raw Ct values of top expressed blood circRNAs and corresponding linear isoforms in HEK293 cells and whole blood (C).

[0029] FIG. 3: Circular to linear RNA isoform expression is high in blood compared to other tissues. (A) Comparison of circular to linear RNA isoforms in blood. circRNAs measured by head-to-tail spanning reads. As a proxy for linear RNA expression median linear splice site spanning reads were counted. Data are shown for one replicate each of blood cerebellum (B) and liver (C). Relative fraction of circRNA candidates with >4× higher expression than linear isoforms are given as inset, eight tested candidates are indicated by numbers, circRNAs derived from hemoglobin are marked in (A). (D) mean circular-to-linear RNA expression ratio for the same samples, in two biological independent replicates. Error bars indicate the standard error of the mean, *** denotes P<0.001 permutation test on pooled replicate data (see Method section in the Examples). (A-D) represent expression datasets for one replicate per sample (FIG. 15).

[0030] FIG. 4: Comparative analysis of blood circRNA expression in Alzheimer's disease patients and controls. (A) Principle Component Analysis (PCA) of circRNA expression for 5 control (H) and 5 Alzheimer's disease (AD) patients. A circRNA subset comprising the top 910 (out of 20,969) detected circRNAs was analyzed (see Results section in the Examples). (B) analysis as in (A) for the corresponding linear RNA isoforms measured by median read count of linear splice junctions. (C) Expression of 200 circRNA candidates with highest weight in PC2 (see A) were used for unsupervised clustering (Spearman's rank correlation as distance metric, see Method section in the Examples). PC2 represents the diseased/healthy principle component. Histograms show expression distribution. Patient details are given underneath each patient ID. (D) analysis as in (C) but for linear RNAs of the corresponding genes (n=167).

[0031] FIG. 5: Reproducibility of circRNA candidate detection. The overlap of 2,442 circRNAs found with at least 2 read counts in both samples is considered as reproducibly detected circRNA set.

[0032] FIG. 6: Technical reproducibility of circRNA candidate detection. A library of blood sample 1 (H_1) was sequenced twice (see Table 2).

[0033] FIG. 7: GO annotation of circRNAs and linear RNAs in blood. Significantly enriched GO terms (p<0.05) for circRNAs found in both samples (n=2,442) and for the same number of top expressed linear RNAs.

[0034] FIG. 8: Predicted circRNA length. Predicted spliced circRNA length distributions for circRNA candidates detected in liver, cerebellum and blood.

[0035] FIG. 9: circRNA candidate validation. (A) Top circRNA candidate expression was measured in qPCR using divergent primer on mock or RNase R treated total RNA preparation. 7/8 were successfully amplified while candidate 7 did not yield specific PCR products and is therefore excluded from further analysis. Linear RNAs and previously described circRNAs are shown as controls. (B) PCR amplicons for divergent and convergent primer sets (c—circular, l—linear) of the tested candidates, end point analysis after 40 cycles. (C) PCR amplicons were subjected to Sanger sequencing and checked for the presence of a head-to-tail junction, representative example result is shown.

[0036] FIG. 10: Comparison of circRNA candidates in blood to liver and cerebellum. (A) Comparison of circular RNA candidates detected in blood (sample 1) and cerebellum shown for the whole expression range. (B) fraction of circRNA candidates that overlap between the two samples binned by blood expression level. (C, D) analysis as before but for liver circRNA candidates.

[0037] FIG. 11: Correlation of linear RNAs in cerebellum and blood and liver and blood. Number of detected transcripts: blood=29,908; cerebellum=38,192; liver=27,880; TPM=transcripts per million.

[0038] FIG. 12: Comparison circ-to-linear expression by RNA-Seq and qPCR. Raw Ct values (Cycle threshold) and median linear splice junction spanning read counts are given for the respective RNA isoform.

[0039] FIG. 13: Histogram of principle components. Principle components (PC) were calculated from the analysis shown in FIG. 4 (A, B).

[0040] FIG. 14: Number of exons per circRNA in blood. Histogram of number of exons per circRNA. Reproducible detected set (2,442) without intergenic circRNAs (n=27); median exon number: 2, mean exon number: 2.8.

[0041] FIG. 15: List of circRNAs detected in human blood. Genomic location, ENSEMBL gene identifier and symbols and gene biotype are given together in Table 1, infra. Here, raw read counts for each circRNA candidate in each sample of healthy subjects (H_1 to H_5) and subjects suffering from Alzheimer's disease (AD_1 to AD_5) are given.

### DETAILED DESCRIPTION OF THE INVENTION

[0042] As outlined herein and exemplified in the Examples, the inventors for the first time provide evidence that circular RNAs (circRNA) is present in whole blood in great amounts and suited as biomarker for diseases in a subject. Hence, the invention relates to a method for diagnosing a disease of a subject, comprising the step of determining the presence or absence of one or more circular RNA (circRNA) in a sample of a bodily fluid of said subject; wherein the presence or absence of said one or more circRNA is indicative for the disease.

[0043] It was unexpectedly possible to show a correlation of differing levels of RNAs and a disease in a tissue other than the sample tissue, i.e. other than the bodily fluid tested. Hence, in a preferred embodiment said disease is not a disease of said bodily fluid. The gist of the present invention is that circRNAs in bodily fluids like blood are unexpectedly suited as biomarkers.

[0044] The term “biomarker” (biological marker) was introduced in 1989 as a Medical Subject Heading (MeSH) term: “measurable and quantifiable biological parameters (e.g., specific enzyme concentration, specific hormone concentration, specific gene phenotype distribution in a population, presence of biological substances) which serve as indices for health- and physiology-related assessments, such as disease risk, psychiatric disorders, environmental exposure and its effects, disease diagnosis, metabolic processes, substance abuse, pregnancy, cell line development, epidemiologic studies, etc.” In 2001, an NIH working group standardized the definition of a biomarker as “a characteristic that is objectively measured and evaluated as an indicator of normal biological processes, pathogenic processes, or pharmacologic responses to a therapeutic intervention” and defined types of biomarkers. A biomarker may be measured on a biosample (as a blood, urine, or tissue test), it may be a recording obtained from a person (blood pressure, ECG, or Holter), or it may be an imaging test (echocardiogram or CT scan). Biomarkers can indicate a variety of health or disease characteristics, including the level or type of exposure to an environmental factor, genetic susceptibility, genetic responses to exposures, markers of subclinical or clinical disease, or indicators of response to therapy. Thus, a simplistic way to think of biomarkers is as indicators of disease trait (risk factor or risk marker), disease state (preclinical or clinical), or disease rate (progression). Accordingly, biomarkers can be classified as antecedent biomarkers (identifying the risk of developing an illness), screening biomarkers (screening for subclinical disease), diagnostic biomarkers (recognizing overt disease), staging biomarkers (categorizing disease severity), or prognostic biomarkers (predicting future disease course, including recurrence and response to therapy, and monitoring efficacy of therapy). The biomarkers of the present invention are preferably antecedent or screening biomarkers. Hence, the methods are methods for diagnosing the presence or the risk for acquiring a disease.

[0045] Biomarkers may also serve as surrogate end points. Although there is limited consensus on this issue, a surrogate end point is one that can be used as an outcome in clinical trials to evaluate safety and effectiveness of therapies in lieu of measurement of the true outcome of interest. The underlying principle is that alterations in the surrogate end point track closely with changes in the outcome of interest. Surrogate end points have the advantage that they may be gathered in a shorter time frame and with less expense than end points such as morbidity and mortality, which require large clinical trials for evaluation. Additional values of surrogate end points include the fact that they are closer to the exposure/intervention of interest and may be easier to relate causally than more distant clinical events. An important disadvantage of surrogate end points is that if the clinical outcome of interest is influenced by numerous factors (in addition to the surrogate end point), residual confounding may reduce the validity of the surrogate end point. It has been suggested that the validity of a surrogate end point is greater if it can explain at least 50% of the effect of an exposure or intervention on the outcome of interest.

[0046] A “sample” in the meaning of the invention can be all biological fluids of the subject, such as lymph, saliva, urine, cerebrospinal fluid or blood. The sample is collected from the patient or subjected to the diagnosis according to the invention. The sample of the bodily fluid is in a preferred embodiment selected from the group consisting of blood, cerebrospinal fluid, saliva, serum, plasma, and semen, the most preferred embodiment of the sample is a whole blood sample. A “sample” in the meaning of the invention may also be a sample originating from a biochemical or chemical reaction such as the product of an amplification reaction. Liquid samples may be subjected to one or more pre-treatments prior to use in the present invention. Such pre-treatments include, but are not limited to dilution, filtration, centrifugation, concentration, sedimentation, precipitation or dialysis. Pre-treatments may also include the addition of chemical or biochemical substances to the solution, e.g. in order to stabilize the sample and the contained nucleic acids, in particular the circRNAs. Such addition of chemical or biochemical substances include acids, bases, buffers, salts, solvents, reactive dyes, detergents, emulsifiers, or chelators, like EDTA. The sample may for instance be taken and directly mixed with such substances. In a particularly preferred embodiment of the invention the sample is a whole blood sample. The whole blood sample is preferably not pre-treated by means of dilution, filtration, centrifugation, concentration, sedimentation, precipitation or dialysis. It is, however, preferred that substances are added to the sample in order to stabilize the sample until onset of analysis. “Stabilizing” in this context means prevention of degradation of the circRNAs to be determined. Preferred stabilizers in this context are EDTA, e.g. K₂EDTA, RNase inhibitors, alcohols e.g. ethanol and isopropanol, agents used to salt out proteins (such as RNAlater).

[0047] “Whole blood” is a venous, arterial or capillary blood sample in which the concentrations and properties of cellular and extra-cellular constituents remain relatively unaltered when compared with their in vivo state. In some embodiments, anticoagulation in vitro stabilizes the constituents in a whole blood sample.

[0048] In a preferred embodiment the sample comprises a nucleic acid or nucleic acids. The term “nucleic acid” is here used in its broadest sense and comprises ribonucleic acids (RNA) and deoxyribonucleic acids (DNA) from all possible sources, in all lengths and configurations, such as double stranded, single stranded, circular, linear or branched. All sub-units and sub-types are also comprised, such as monomeric nucleotides, oligomers, plasmids, viral and bacterial nucleic acids, as well as genomic and non-genomic DNA and RNA from the subject, circular RNA (circRNA), messenger RNA (mRNA) in processed and unprocessed form, transfer RNA (tRNA), heterogeneous nuclear RNA (hn-RNA), ribosomal RNA (rRNA), complementary DNA (cDNA) as well as all other conceivable nucleic acids. However, in the most preferred embodiment the sample comprises circRNAs.

[0049] “Presence” or “absence” of a circRNA in connection with the present invention means that the circRNA is present at levels above a certain threshold or below a certain threshold, respectively. In case the threshold is “0” this would mean that “presence” is the actual presence of circRNA in the sample and “absence” is the actual absence. However, “presence” in context with the present invention may also mean that the respective circRNA is present at a level above a threshold, e.g. the levels determined in a control. “absence” in this context then means that the level of the circRNA is at or below the certain threshold. Hence, it is preferred that the method of the present invention comprises determining of the level of one or more circRNA and comparing it to a control level of said one or more circRNA. In a preferred embodiment of the invention the determination step comprises: (i) determining the level of said one or more circRNA; and (ii) comparing the determined level to a control level of said one or more circRNA; wherein differing levels between the determined and the control level are indicative for the disease. In other words, the invention relates to a method for diagnosing a disease of a subject, comprising the step of (i) determining the level of said one or more circRNA; and (ii) comparing the determined level to a control level of said one or more circRNA; wherein differing levels between the determined and the control level are indicative for the disease.

[0050] The term “control level” relates to a level to which the determined level is compared in order to allow the distinction between “presence” or “absence” of the circRNA. The control level is preferably the level which is determinant for the deductive step of making the actual diagnose. Control level in a preferred embodiment relates to the level of the respective circRNA in a healthy subject or a population of healthy subjects, i.e. a subject not having the disease to be diagnosed, e.g. not having a neurodegenerative disease, such as Alzheimer's disease. The skilled person with the disclosure of the present application is in the position to determine suited control levels using common statistical methods.

[0051] In the context of the present invention, the levels of the one or more circRNA may be analyzed in a number of fashions well known to a person skilled in the art. For example, each assay result obtained may be compared to a “normal” or “control” value, or a value indicating a particular disease or outcome. A particular diagnosis/prognosis may depend upon the comparison of each assay result to such a value, which may be referred to as a diagnostic or prognostic “threshold”. In certain embodiments, assays for one or more diagnostic or prognostic indicators are correlated to a condition or disease by merely the presence or absence of the circRNAs in the assay. For example, an assay can be designed so that a positive signal only occurs above a particular threshold level of interest, and below which level the assay provides no signal above background.

[0052] The sensitivity and specificity of a diagnostic and/or prognostic test depends on more than just the analytical “quality” of the test, they also depend on the definition of what constitutes an abnormal result, i.e. when a level may be regarded as differing from a control level. In practice, Receiver Operating Characteristic curves (ROC curves), are typically calculated by plotting the value of a variable versus its relative frequency in “normal” (i.e. apparently healthy individuals not having ovarian cancer) and “disease” populations. For any particular marker, a distribution of marker levels for subjects with and without a disease will likely overlap. Under such conditions, a test does not absolutely distinguish normal from disease with 100% accuracy, and the area of overlap indicates where the test cannot distinguish normal from disease. A threshold is selected, below which the test is considered to be abnormal and above which the test is considered to be normal. The area under the ROC curve is a measure of the probability that the perceived measurement will allow correct identification of a condition. ROC curves can be used even when test results don't necessarily give an accurate number. As long as one can rank results, one can create a ROC curve. For example, results of a test on “disease” samples might be ranked according to degree (e.g. 1=low, 2=normal, and 3=high). This ranking can be correlated to results in the “normal” or “control” population, and a ROC curve created. These methods are well known in the art. See, e.g., Hanley et al. 1982. Radiology 143: 29-36. Preferably, a threshold is selected to provide a ROC curve area of greater than about 0.5, more preferably greater than about 0.7, still more preferably greater than about 0.8, even more preferably greater than about 0.85, and most preferably greater than about 0.9. The term “about” in this context refers to +/−5% of a given measurement.

[0053] The horizontal axis of the ROC curve represents (1-specificity), which increases with the rate of false positives. The vertical axis of the curve represents sensitivity, which increases with the rate of true positives. Thus, for a particular cut-off selected, the value of (1-specificity) may be determined, and a corresponding sensitivity may be obtained. The area under the ROC curve is a measure of the probability that the measured marker level will allow correct identification of a disease or condition. Thus, the area under the ROC curve can be used to determine the effectiveness of the test.

[0054] In other embodiments, a positive likelihood ratio, negative likelihood ratio, odds ratio, or hazard ratio is used as a measure of a test's ability to predict risk or diagnose a disease. In the case of a positive likelihood ratio, a value of 1 indicates that a positive result is equally likely among subjects in both the “diseased” and “control” groups; a value greater than 1 indicates that a positive result is more likely in the diseased group; and a value less than 1 indicates that a positive result is more likely in the control group. In the case of a negative likelihood ratio, a value of 1 indicates that a negative result is equally likely among subjects in both the “diseased” and “control” groups; a value greater than 1 indicates that a negative result is more likely in the test group; and a value less than 1 indicates that a negative result is more likely in the control group.

[0055] In the case of an odds ratio, a value of 1 indicates that a positive result is equally likely among subjects in both the “diseased” and “control” groups; a value greater than 1 indicates that a positive result is more likely in the diseased group; and a value less than 1 indicates that a positive result is more likely in the control group.

[0056] In the case of a hazard ratio, a value of 1 indicates that the relative risk of an endpoint (e.g., death) is equal in both the “diseased” and “control” groups; a value greater than 1 indicates that the risk is greater in the diseased group; and a value less than 1 indicates that the risk is greater in the control group.

[0057] The skilled artisan will understand that associating a diagnostic or prognostic indicator, with a diagnosis or with a prognostic risk of a future clinical outcome is a statistical analysis. For example, a marker level of lower than X may signal that a patient is more likely to suffer from an adverse outcome than patients with a level more than or equal to X, as determined by a level of statistical significance. For another marker, a marker level of higher than X may signal that a patient is more likely to suffer from an adverse outcome than patients with a level less than or equal to X, as determined by a level of statistical significance. Additionally, a change in marker concentration from baseline levels may be reflective of patient prognosis, and the degree of change in marker level may be related to the severity of adverse events. Statistical significance is often determined by comparing two or more populations, and determining a confidence interval and/or a p value. See, e.g., Dowdy and Wearden, Statistics for Research, John Wiley & Sons, New York, 1983. Preferred confidence intervals of the invention are 90%, 95%, 97.5%, 98%, 99%, 99.5%, 99.9% and 99.99%, while preferred p values are 0.1, 0.05, 0.025, 0.02, 0.01, 0.005, 0.001, and 0.0001.

[0058] Suitable threshold levels for the diagnosis of the disease can be determined for certain combinations of circRNAs. This can e.g. be done by grouping a reference population of patients according to their level of circRNAs into certain quantiles, e.g. quartiles, quintiles or even according to suitable percentiles. For each of the quantiles or groups above and below certain percentiles, hazard ratios can be calculated comparing the risk for an adverse outcome, i.e. a “disease” or “Alzheimer's disease”, between those patients who have a certain disease and those who have not. In such a scenario, a hazard ratio (HR) above 1 indicates a higher risk for an adverse outcome for the patients. A HR below 1 indicates beneficial effects of a certain treatment in the group of patients. A HR around 1 (e.g. +/−0.1) indicates no elevated risk for the particular group of patients. By comparison of the HR between certain quantiles of patients with each other and with the HR of the overall population of patients, it is possible to identify those quantiles of patients who have an elevated risk and those who benefit from medication and thereby stratify subjects according to the present invention.

[0059] In some cases presence of the disease will not affect patients with levels (e.g. in the fifth quintile) of a circRNA different from the “control level”, while in other cases patients with levels similar to the control level will be affected (e.g. in the first quintile). However, with the above explanations and his common knowledge, a skilled person is able to identify those groups of patients having a disease, e.g. a neurodegenerative disease as Alzheimer's disease. Exemplarily, some combinations of levels of circRNAs are listed for Alzheimer's disease in the appended examples. In another embodiment of the invention, the diagnosis is determined by relating the patient's individual level of marker peptide to certain percentiles (e.g. 97.5th percentile (in case increased levels being indicative for a disease) or the 2.5^{th} percentile (in case decreased levels being indicative for a disease)) of a healthy population.

[0060] Kaplan-Meier estimators may be used for the assessment or prediction of the outcome or risk (e.g. diagnosis, relapse, progression or morbidity) of a patient.

[0061] “Equal” level in context with the present invention means that the levels differ by not more than ±10%, preferably by not more than ±5%, more preferably by not more than ±2%. “Decreased” or “increased” level in the context of the present invention mean that the levels differ by more than 10%, preferably by more than 15%, preferably more than 20%.

[0062] The term “subject” relates to a subject to be diagnosed, preferably a subject suspected to have or to have a risk for acquiring a disease, preferably a neurodegenerative disease, more preferably a subject suspected to have or to have a risk for acquiring Alzheimer's disease. The subject is preferably an animal, more preferably a mammal, most preferably a human.

[0063] The inventors have found that differential abundance of circRNA in samples of a bodily fluid is suited as a biomarker. It has been found that differing levels of circRNAs are correlating with a disease. This has been proven for Alzheimer's disease, a disease of neuronal tissue. Without being bound by reference, the correlation may be due to a passage of the circRNAs through the blood-brain-barrier, i.e. the circRNAs detected in the method according to the present invention are differentially expressed in the tissue of the disease, i.e. the tissue of interest. In case of the neurodegenerative disease (e.g. Alzheimer's disease) the tissue of interest is neuronal tissue, e.g. the brain. Hence, in one embodiment of the present invention said one or more circRNA, the differing levels of which in the bodily fluid are attributed to the presence of the disease, is differentially expressed between the diseased and non-diseased state in the tissue of interest. Alternatively, the circRNA levels may be of secondary nature, e.g. arise due to an immune response in the bodily fluid. Hence, in a further embodiment said one or more circRNA, the differing levels of which in the bodily fluid are attributed to the presence of the disease, is not differentially expressed between the diseased and non-diseased state in the tissue of interest.

[0064] Circular RNA” (circRNA) has been previously described. However, not in connection with their detection in a bodily fluid, e.g. blood. The skilled person is able to determine whether a detected RNA is a circular RNA. In particular, a circRNA does not contain a free 3′-end or a free 5′ end, i.e. the entire nucleic acid is circularized. The circRNA is preferably a circularized, single stranded RNA molecule. Furthermore, the circRNA according to the present invention is a result of a head-to-tail splicing event that results in a discontinuous sequence with respect to the genomic sequence encoding the RNA. This means that a first sequence being present 5′-upstream of a second sequence in the genomic context, on the circRNA said first sequence at its 5′-end is linked to the 3′ end of said second sequence and thereby closing the circle. The consequence of this arrangement is that at the junction where the 5′-end of said first sequence is linked to the 3′-end of said second sequence a unique sequence is build that is neither present in the genomic context nor in the normally transcribed RNA, e.g. mRNA. It has been found by the inventors that these junctions in all identified circRNAs, in the genomic context, are flanked by the canonical splice sequence, the GT/AG splice signal known by the skilled person. Hence, the circRNAs according to the present invention preferably contain an exon-exon junction in a head-to-tail arrangement, as visualized in FIG. 1A as a result of a back-splicing reaction. The skilled person will recognize that a usual mRNA transcript contains exon-exon junctions in a tail-to-head arrangement, i.e. the 3′ end (tail) of exon being upstream in the genomic context is linked to the 5′ end (head) of the exon being downstream in the genomic context. The actual junction, i.e. the point at which the one exon is linked to the other is also referred to herein as “breakpoint”. In a preferred embodiment the presence or absence of a circRNA or the level of a circRNA is determined by detection of an exon-exon-junction in a head-to-tail arrangement. One possible approach is exemplified in the enclosed examples. The detection of circular RNA has been previously described in Memczak S, Jens M, Elefsinioti A, et al. Circular RNAs are a large class of animal RNAs with regulatory potency. Nature. 2013; 495(7441):333-338, which is incorporated herein by reference in particular as relates to the detection and annotation of circRNAs. The biogenesis of many mammalian circRNAs depends on complementary sequences within flanking introns (see Ashwal-Fluss R, Meyer M, Pamudurti N R, et al. circRNA Biogenesis Competes with Pre-mRNA Splicing. MOLCEL. 2014; 1-12; Rybak-Wolf A, Stottmeister C, Glažar P, et al. Circular RNAs in the Mammalian Brain Are Highly Abundant, Conserved, and Dynamically Expressed. MOLCEL. 2015; 1-17; Zhang X-O, Wang H-B, Zhang Y, et al. Complementary Sequence-Mediated Exon Circularization. Cell. 2014; Liang D, Wilusz J E. Short intronic repeat sequences facilitate circular RNA production. Genes and Development. 2014; Conn S J, Pillman K A, Toubia J, et al. The RNA Binding Protein Quaking Regulates Formation of circRNAs. Cell. 2015; 160(6):1125-1134; and Ivanov A, Memczak S, Wyler E, et al. Analysis of Intron Sequences Reveals Hallmarks of Circular RNA Biogenesis in Animals. CellReports. 2015; 10(2):170-177). Hence, in one embodiment the two introns upstream and downstream of and direct adjacent in the genomic context to the exons of the exon-exon junction (i.e. forming the exon-exon junction) in a head to tail arrangement often contain complementary sequences, e.g. a complementary sequence stretch of at least 15 nucleotides, preferably 500 nucleotides, more preferably 1000 nucleotides. For detection of circRNA in principle, the RNA of a sample is sequenced after reverse transcription and library preparation. Afterwards, the sequences are analyzed for the presence of exon-exon junctions in a head-to-tail arrangement. For instance RNA sequenced can be mapped to a reference genome using common mapping programs and software, e.g. bowtie2 (version 2.1.0; see Langmead B, Salzberg S L. Fast gapped-read alignment with Bowtie 2. Nature Methods. 2012; 9(4):357-359). Human reference genomes are known to the skilled person and include the human reference genome hg19 (February 2009, GRCh37; downloadable from the UCSC genome browser; see Kent W J, Sugnet C W, Furey T S, et al. The human genome browser at UCSC. Genome Research. 2002; 12(6):996-1006). Although circRNA detection in blood is possible without any preprocessing of the total RNA sample, it is preferred to deplete ribosomal RNAs (rRNA), preferably the majority of rRNA, to increase the sensitivity of circRNA detection, in particular when using RNA Sequencing approaches. To this end, the content of rRNAin the sample should be depleted to less than 20%, preferably less than 10%, more preferably less than 2% with respect to the total RNA content. The rRNA depletion may performed as known in the art, e.g. it may be facilitated by commercially available kits (e.g. Ribominus, Themo Scientific) or enzymatic methods (Xian Adiconis et al. Comprehensive comparative analysis of RNA sequencing methods for degraded or low input samples Nat Methods. 2013 July; 10(7): 10.1038/nmeth.2483.).

[0065] Further, in a preferred embodiment RNA sequences which map continuously to the genome by aligning without any trimming (end-to-end mode) are neglected. Reads not mapping continuously to the genome are preferably used for circRNA candidate detection. The terminal sequences (anchors) from the sequences, e.g. 20 nt or more, may be extracted and re-aligned independently to the genome. From this alignment the sequences may be extended until the full circRNA sequence is covered, i.e. aligned. Consecutively aligning anchors indicate linear splicing events whereas alignment in reverse orientation indicates head-to-tail splicing as observed in circRNAs (see FIG. 1A). The so identified resulting splicing events are filtered using the following criteria 1) GT/AG signal flanking the splice sites in the genomic context; 2) the breakpoint, i.e. the exon-exon-junction can be unambiguously detected; and 3) no more than 100 kilobases distance between the two splice sites in the genomic context. Furthermore, further optional criteria may be used, depending on the method chosen; e.g. a maximum of two mismatches when extending the anchor alignments; a breakpoint no more than two nucleotides inside the alignment of the anchors; at least two independent reads supporting the head-to-tail splice junction; and/or a minimum difference of 35 in the bowtie2 alignment score between the first and the second best alignment of each anchor.

[0066] The circRNAs according to the present invention may be detected using different techniques. As outlined herein, the exon-exon junction in a head-to-tail arrangement is unique to the circRNAs. Hence, the detection of these is preferred. Nucleic acid detection methods are commonly known to the skilled person and include probe hybridization based methods, nucleic acid amplification based methods, and nucleic acid sequencing, or combinations thereof. Hence, in a preferred embodiment of the present invention circRNA is detected using a method selected from the group consisting of probe hybridization based methods, nucleic acid amplification based methods, and nucleic acid sequencing.

[0067] Probe hybridization based method employ the feature of nucleic acids to specifically hybridize to a complementary strand. To this end nucleic acid probes may be employed that specifically hybridize to the exon-exon junction in a head-to-tail arrangement of the circRNA, i.e. to a sequence spanning the exon-exon junction, preferably to the region extending from 10 nt upstream to 10 nt downstream of the exon-exon junction, preferably to the region from 20 nt upstream to 20 nt downstream of the exon-exon junction, or even a greater region spanning the exon-exon junction. The skilled person will recognize that hybridization probes specifically hybridizing to the respective sequence of the circRNA may be used, as well as hybridization probes specifically hybridizing to the reverse complement sequence thereof, e.g. in case the circRNA is previously reverse transcribed to cDNA and/or amplified.

[0068] Hybridization can also be used as a measure of homology between two nucleic acid sequences. A nucleic acid sequence hybridizing specifically to an exon-exon junction in a head-to-tail arrangement according to the present invention may be used as a hybridization probe according to standard hybridization techniques. The hybridization of the probe to DNA or RNA from a test source (e.g., the bodily fluid, like whole blood, or amplified nucleic acids from the sample of the bodily fluid) is an indication of the presence of the relevant circRNA in the test source.

[0069] Hybridization conditions are known to those skilled in the art and can be found in Current Protocols in Molecular Biology, John Wiley & Sons, N.Y., 6.3.1-6.3.6, 1991. Preferably, specific hybridization refers to hybridization under stringent conditions. “Stringent conditions” are defined as equivalent to hybridization in 6× sodium chloride/sodium citrate (SSC) at 45° C., followed by a wash in 0.2×SSC, 0.1% SDS at 65° C.; or as equivalent to hybridization in commercially available hybridization buffers (e.g. ULTRAHyb, ThermoScientific) for blotting techniques and 5×SSC 0.5% SDS (750 mM NaCl, 75 mM sodium citrate, 0.5% sodiumdodecylsulfate, pH 7.0) for array based detection methods at 65° C.

[0070] The means and methods of the present invention preferably comprise the use of nucleic acid probes. A nucleic acid probe according to the present invention is an oligonucleotide, nucleic acid or a fragment thereof, which is substantially complementary to a specific nucleic acid sequence. “substantially complementary” refers to the ability to hybridize to the specific nucleic acid sequence under stringent conditions.

[0071] The skilled person knows means and methods to determine the levels of nucleic acids in a sample and compare them to control levels. Such methods may employ labeled nucleic acid probes according to the invention. “Labels” include fluorescent or enzymatic active labels as further defined herein below. Such methods include real-time PCR methods and microarray methods, like Affimetrix®, nanostring and the like.

[0072] The determination of the circRNAs or their level may also be detected using sequencing techniques. The skilled person is able to use sequencing techniques in connection with the present invention. Sequencing techniques include but are not limited to Maxam-Gilbert Sequencing, Sanger sequencing (chain-termination method using ddNTPs), and next generation sequencing methods, like massively parallel signature sequencing (MPSS), polony sequencing, 454 pyrosequencing, Illumina (Solexa) sequencing, SOLiD sequencing, or ion torrent semiconductor sequencing or single molecule, real-time technology sequencing (SMRT).

[0073] The detection/determination of the circRNAs and the respective level may also employ nucleic acid amplification method alone or in combination with the sequencing and/or hybridization method. Nucleic acid amplification may be used to amplify the sequence of interest prior to detection. It may however also be used for quantifying a nucleic acid, e.g. by real-time PCR methods. Such methods are commonly known to the skilled person. Nucleic acid amplification methods for example include rolling circle amplification (such as in Liu, et al., “Rolling circle DNA synthesis: Small circular oligonucleotides as efficient templates for DNA polymerases,” J. Am. Chem. Soc. 118:1587-1594 (1996).), isothermal amplification (such as in Walker, et al., “Strand displacement amplification—an isothermal, in vitro DNA amplification technique,” Nucleic Acids Res. 20(7):1691-6 (1992)), ligase chain reaction (such as in Landegren, et al., “A Ligase-Mediated Gene Detection Technique,” Science 241:1077-1080, 1988, or, in Wiedmann, et al., “Ligase Chain Reaction (LCR)—Overview and Applications,” PCR Methods and Applications (Cold Spring Harbor Laboratory Press, Cold Spring Harbor Laboratory, N Y, 1994) pp. S51-S64.)). Nucleic-acid amplification can be accomplished by any of the various nucleic-acid amplification methods known in the art, including but not limited to the polymerase chain reaction (PCR), ligase chain reaction (LCR), transcription-based amplification system (TAS), nucleic acid sequence based amplification (NASBA), rolling circle amplification (RCA), transcription-mediated amplification (TMA), self-sustaining sequence replication (3SR) and Qβ amplification. It will be readily understood that the amplification of the circRNA may start with a reverse transcription of the RNA into complementary DNA (cDNA), optionally followed by amplification of the so produced cDNA.

[0074] It may be desirable to reduce or diminish non circRNA prior to the determination or the presence or level of the circRNAs. To this end RNA degrading agents may be added to the sample and/or the isolated total nucleic acids, e.g. total RNA, thereof, wherein said RNA degrading agent does not degrade circRNAs or does degrade circRNAs only at lower rates as compared to linear RNAs. One such agent is RNase R. RNase R is a 3′-5′ exoribonuclease closely related to RNase II, which has been shown to be involved in selective mRNA degradation, particularly of non stop mRNAs in bacteria (see Cheng; Deutscher, M P et al. (2005). “An important role for RNase R in mRNA decay”. Molecular Cell 17(2):313-318; and Venkataraman, K; Guja, K E; Garcia-Diaz, M; Karzai, A W (2014). “Non-stop mRNA decay: a special attribute of trans-translation mediated ribosome rescue.”; Frontiers in microbiology 5:93. Suzuki H1, Zuo Y, Wang J, Zhang M Q, Malhotra A, Mayeda A; Characterization of RNase R-digested cellular RNA source that consists of lariat and circular RNAs from pre-mRNA splicing; Nucleic Acids Res. 2006 May 8; 34(8):e63.). RNase R has homologues in many other organisms. When a part of another larger protein has a domain that is very similar to RNase R, this is called an RNase R domain. Hence, in a preferred embodiment the sample is treated with RNase R before determination of the circRNA to deplete linear RNA isoforms from the total RNA preparation and thereby increase detection sensitivity.

[0075] As outlined herein, the diagnostic or prognostic value of a single circRNA may not be sufficient in order to allow a diagnosis or prognosis with a reliable result. In such case it may be desirable to determine the presence or level of more than one circRNA in the sample and optionally comparing them to the respective control level. The skilled person will acknowledge that these more than one circRNAs may be chosen from a predetermined panel of circRNAs. Such panel usually includes the minimum number of circRNAs necessary to allow a reliable diagnosis or prognosis. The number of circRNAs of the panel may vary depending on the desired reliability and/or the prognostic or diagnostic value of the included circRNAs, e.g. when determined alone. Hence, the method according to the present invention in a preferred embodiment determines more than one circRNA from a panel of circRNAs, e.g. their presence or absence, or level, respectively.

[0076] The panel for obtaining the desired may be chosen according to the needs. In particular the skilled person may apply statistical approaches as outlined herein in order to validate the diagnostic and/or prognostic significance of a certain panel. The inventors have herein shown for a neurodegenerative disease the development of a certain panel of circRNAs giving a reasonable degree of certainty. The skilled person may apply common statistical techniques in order to develop a panel of circRNAs. Such statistical techniques include cluster analysis (e.g. hierarchical or k-means clustering), principle component analysis or factor analysis.

[0077] In principle, the statistical methods aim the identification of circRNAs or panels of circRNAs that exhibit differing presence and/or levels in samples of diseased and healthy/normal subjects. As outlined, the panel is preferably a panel of more than one circRNA, i.e. a plurality. In a preferred embodiment of the invention said panel comprises a plurality of circRNAs that have been identified as being present at differing levels in bodily fluid samples of patients having the disease and patients not having the disease. The panel of circRNAs has been preferably identified by principle component analysis or clustering.

[0078] The “principle component analysis” (PCA) (as also used exemplified herein) regards the analysis of factors differing between diseased and healthy subjects. PCA is known to the skilled person (see Pearson K., “On lines and planes of closest fit to systems of points in space”, The London, Edinburgh, and Dublin Philosophical Magazine and Journal of Science 2.11 559-572 (1901), and Hotelling H., “Analysis of a complex of statistical variables into principal components” Journal of educational psychology 24.6 417 (1933)). The circRNAs to be chosen for the principle component analysis may be those previously determined in samples of healthy and/or diseased subject. Thresholds may be incorporated in order to consider a circRNA for further analysis, in a preferred embodiment only circRNAs having an expression value of at least 6.7 after variance stabilizing transformation of raw read counts in one of the samples. PCA may be performed on circRNAs included in the analysis using the prcomp function of the standard package “stats” of the “R” programming language (R Core Team (2013). R: A language and environment for statistical computing. R Foundation for Statistical Computing, Vienna, Austria. ISBN 3-900051-07-0). Depending on the circRNAs chosen, the disease and other factors, the weights can vary. However, the skilled artisan will acknowledge that these circRNAs with the highest weight as regards the principle component of interest, i.e. disease/healthy state, shall be chosen in order to obtain the circRNAs with the highest predictive absolute values. PCA is used to visualize and measure the amount of variation in a data set. Mathematically, PCA is an orthogonal linear transformation that transforms the data to a new coordinate system such that the greatest variance by some projection of the data lies on the first coordinate which is called Principal Component 1 (PC1) and so on. The before mentioned calculated weight represents the distance of each circular RNA to this specific projection. Thus, the higher the absolute value the more relevant is for this projection.

[0079] “Hierarchical Clustering” (also referred to herein as “clustering”) may be performed as known in the art (reviewed in Murtagh, F and Conteras, P “Methods of hierarchical clustering” arXiv preprint arXiv:1105.0121 (2011)). Samples may be clustered on log₂ transformed normalized circRNA expression profiles (log₂(nᵢ+1)). Hierarchical, agglomerative clustering may be performed with complete linkage and optionally by further using Spearman's rank correlation as distance metric (1−{corr [log(nᵢ+1)]}). “The goal of cluster analysis is to partition observations (here circRNA expression) into groups (“clusters”) so that the pairwise dissimilarities between those assigned to the same cluster tend to be smaller than those in different clusters” (see Friedman J, Hastie T, and Tibshiriani R, “The elements of statistical learning”, Vol. 1. Soringer, Berlin: Springer series in statistics (2001)). Here, the measure for dissimilarity is defined as the Spearman's rank correlation. A visualization and complete description of the hierarchical clustering is provided by a dendrogram.

[0080] The inventors have exemplified the method outlined above for a neurodegenerative disease, in particular Alzheimer's disease. A neurodegenerative disease in context with the present invention is to be understood as a disease associated with neurodegeneration. Neurodegeneration means a progressive loss of structure or function of neurons, including death of neurons. Many neurodegenerative diseases including ALS, Parkinson's, Alzheimer's, and Huntington's occur as a result of neurodegenerative processes. Nowadays, many similarities exist that relate these diseases to one another on a sub-cellular level. There are many parallels between different neurodegenerative disorders including atypical protein assemblies (protein misfolding and/or agglomeration) as well as induced cell death. Neurodegeneration can be found in many different levels of neuronal circuitry ranging from molecular to systemic. Hence, in a preferred embodiment of the present invention the disease is a neurodegenerative disease, preferably selected from the group of Alzheimer's, ALS, Parkinson's, and Huntington's.

[0081] In a particularly preferred embodiment the disease is Alzheimer's disease. Alzheimer's disease has been identified as a protein misfolding disease (proteopathy), causing plaque accumulation of abnormally folded amyloid beta protein, and tau protein in the brain. Plaques are made up of small peptides, 39-43 amino acids in length, called amyloid beta (Aβ). AP is a fragment from the larger amyloid precursor protein (APP). APP is a transmembrane protein that penetrates through the neuron's membrane. APP is critical to neuron growth, survival, and post-injury repair. In Alzheimer's disease, an unknown enzyme in a proteolytic process causes APP to be divided into smaller fragments. One of these fragments gives rise to fibrils of amyloid beta, which then form clumps that deposit outside neurons in dense formations known as senile plaques. AD is also considered a tauopathy due to abnormal aggregation of the tau protein. In AD, tau undergoes chemical changes, becoming hyperphosphorylated; it then begins to pair with other threads, creating neurofibrillary tangles and disintegrating the neuron's transport system. A patient, is classified as having Alzheimer's disease according to the criteria as set by the National Institute of Neurological and Communicative Disorders and Stroke (NINCDS) and the Alzheimer's disease and Related Disorders Association (ADRDA, now known as the Alzheimer's Association), the NINCDS-ADRDA Alzheimer's Criteria for diagnosis in 1984, extensively updated in 2007 (see McKhann G, Drachman D, Folstein M, et al. Clinical Diagnosis of Alzheimer's disease: Report of the NINCDS-ADRDA Work Group under the Auspices of Department of Health and Human Services Task Force on Alzheimer's disease. Neurology. 1984; 34(7):939-44; and Dubois B, Feldman H H, Jacova C, et al. Research Criteria for the Diagnosis of Alzheimer's disease: Revising the NINCDS-ADRDA Criteria. Lancet Neurology. 2007; 6(8):734-469). These criteria require that the presence of cognitive impairment, and a suspected dementia syndrome, be confirmed by neuropsychological testing for a clinical diagnosis of possible or probable Alzheimer's disease. A histopathologic confirmation including a microscopic examination of brain tissue is required for a definitive diagnosis. Good statistical reliability and validity have been shown between the diagnostic criteria and definitive histopathological confirmation (see Blacker D, Albert M S, Bassett S S, et al. Reliability and validity of NINCDS-ADRDA criteria for Alzheimer's disease. The National Institute of Mental Health Genetics Initiative. Archives of Neurology. 1994; 51(12):1198-204). Eight cognitive domains are most commonly impaired in AD memory, language, perceptual skills, attention, constructive abilities, orientation, problem solving and functional abilities. These domains are equivalent to the NINCDS-ADRDA Alzheimer's Criteria as listed in the Diagnostic and Statistical Manual of Mental Disorders (DSM-IV-TR) published by the American Psychiatric Association.

[0082] In a particular preferred embodiment of the present invention, it relates to a method for diagnosing a neurodegenerative disease in a subject comprises the steps of:
[0083] determining the level of one or more circRNA in a sample of a bodily fluid of said subject;
[0084] comparing the determined level to a control level of said one or more circRNA;

[0085] wherein differing levels between the determined and the control level are indicative for the disease. The neurodegenerative disease is most preferably Alzheimer's disease.

[0086] The inventors have identified specific circRNAs that have a predictive or diagnostic value as regards the neurodegenerative disease. In particular 910 highly expressed circRNAs have been identified that are differentially present in samples of patients with a neurodegenerative disease as compared to the healthy controls. These 910 circRNAs are particularly characterized by their exon-exon junction in a head-to-tail arrangement, as outlined herein above. The sequences encoding the 20 nucleotides upstream and 20 nucleotides downstream of said exon-exon junction in the respective circRNAs are given in SEQ ID NOs: 1 to 910. However, it may be sufficient to determine only 10 nucleotides upstream and 10 nucleotides downstream of the junction in order to detect the circRNAs specifically. Hence, in a preferred embodiment said one or more circRNA in the method for diagnosing the neurodegenerative disease comprises a sequence encoded by a sequence selected from the group consisting of nucleotides 11 to 30 of any of the sequences of SEQ ID NO:1 to SEQ ID NO:910. The circRNA may for instance be detected through determining the presence or levels of RNA comprising the respective sequences, e.g. by hybridization, sequencing and/or amplification methods as outlined herein. SEQ ID NO:1 to 1820 list the DNA sequences encoding the sequences of the exon-exon junctions or the complete sequences of the circRNAs of the present invention. “Encoded” in this regard means that the RNA encoded by the DNA sequence has the sequence of nucleotides as set out in the DNA sequence with the thymidines “T” being exchanged by uracils “U”, the backbone being ribonucleic acid instead of deoxyribonucleic acid. X

[0087] The inventors found that the circRNAs are indicative for the presence or the risk of acquiring a neurodegenerative disease when present at increased or decreased levels. Whether the presence of the specific circRNA at decreased or increased levels is indicative for the neurodegenerative disease is given in Table 1. Hence, in a particular preferred embodiment the presence of increased or decreased levels as defined in Table 1 under “diseased” for the circRNA comprising the respectively encoded sequence are indicative for the presence of or risk of acquiring a neurodegenerative disease, preferably for Alzheimer's disease. As outlined in the Table's legend, “+” denotes that increased levels and/or the presence of the respective circRNA are indicative for the presence or risk of acquiring Alzheimer's disease, while “−” denotes that decreased levels and/or the absence of the respective circRNA are indicative for the presence or risk of acquiring Alzheimer's disease.

[0088] As mentioned, the circRNAs may be detected through the unique sequences occurring at the exon-exon junction in the head-to-tail arrangement. However, in one embodiment the circRNA may be detected through detection of a larger portion of their sequence. In one embodiment of the method for diagnosing a neurodegenerative disease, preferably Alzheimer's disease, said one or more circRNA has a sequence as encoded by a sequence selected from the group consisting of SEQ ID NO:911 to SEQ ID NO:1820. Preferably the presence of increased or decreased levels as defined in Table 1 under “disease” for the circRNA having the respective encoded sequence are indicative for the presence of a neurodegenerative disease, preferably Alzheimer's disease.

TABLE 1
Preferred circRNAs in connection with the diagnosis of a neurodegenerative disease, preferably Alzheimer's disease:

| SEQ ID | SEQ ID | | | | | | | | |
|---|---|---|---|---|---|---|---|---|---|
| NO | NO full | circID | | | | | | | |
| junction | length | “#” | chr | start | stop | gene | gene_name | score | diseased |
| 1 | 911 | 09611 | chr17 | 29130918 | 29131126 | ENSG00000176390 | CRLF3 | −3.022350822 | − |
| 2 | 912 | 04805 | chr11 | 85718584 | 85742653 | ENSG00000073921 | PICALM | 2.660787274 | + |
| 3 | 913 | 06983 | chr14 | 35020919 | 35024118 | NA | NA | −2.59734763 | − |
| 4 | 914 | 11279 | chr19 | 37916769 | 37917280 | ENSG00000196437 | ZNF569 | −2.257101936 | − |
| 5 | 915 | 09640 | chr17 | 30315338 | 30315516 | ENSG00000178691 | SUZ12 | −2.204418987 | − |
| 6 | 916 | 00725 | chr1 | 1756835 | 1770677 | ENSG00000078369 | GNB1 | −2.182283795 | − |
| 7 | 917 | 17120 | chr4 | 54249939 | 54256040 | ENSG00000145216 | FIP1L1 | −2.176395303 | − |
| 8 | 918 | 00155 | chr1 | 114450630 | 114450813 | ENSG00000118655 | DCLRE1B | −2.150719181 | − |
| 9 | 919 | 18778 | chr6 | 111583459 | 111585149 | ENSG00000173214 | KIAA1919 | −2.150503499 | − |
| 10 | 920 | 09544 | chr17 | 27778472 | 27778698 | ENSG00000160551 | TAOK1 | −2.023829904 | − |
| 11 | 921 | 15325 | chr3 | 169840378 | 169840532 | ENSG00000173889 | PHC3 | −2.009445974 | − |
| 12 | 922 | 06048 | chr12 | 938227 | 939110 | ENSG00000060237 | WNK1 | −1.981641605 | − |
| 13 | 923 | 17070 | chr4 | 48503639 | 48507632 | ENSG00000075539 | FRYL | −1.892671504 | |
| 14 | 924 | 05238 | chr12 | 121220457 | 121222396 | ENSG00000157837 | SPPL3 | −1.85677938 | − |
| 15 | 925 | 17655 | chr5 | 132227855 | 132228810 | ENSG00000072364 | AFF4 | −1.850977839 | − |
| 16 | 926 | 01651 | chr1 | 29313942 | 29323831 | ENSG00000159023 | EPB41 | −1.8320179 | − |
| 17 | 927 | 11479 | chr19 | 8520288 | 8528570 | ENSG00000099783 | HNRNPM | −1.802172301 | − |
| 18 | 928 | 17787 | chr5 | 142434003 | 142437312 | ENSG00000145819 | ARHGAP26 | −1.799997822 | − |
| 19 | 929 | 20940 | chr8 | 101299728 | 101300495 | ENSG00000034677 | RNF19A | −1.790427008 | − |
| 20 | 930 | 10338 | chr17 | 65916130 | 65919106 | ENSG00000171634 | BPTF | −1.790398051 | − |
| 21 | 931 | 14397 | chr22 | 28306951 | 28310335 | ENSG00000180957 | PITPNB | 1.774695607 | + |
| 22 | 932 | 09432 | chr17 | 18208425 | 18210280 | ENSG00000177302 | TOP3A | −1.759757408 | − |
| 23 | 933 | 01741 | chr1 | 31810021 | 31811895 | ENSG00000121766 | ZCCHC17 | −1.757819625 | − |
| 24 | 934 | 15327 | chr3 | 169840378 | 169843795 | ENSG00000173889 | PHC3 | −1.733435542 | − |
| 25 | 935 | 01556 | chr1 | 25553932 | 25554726 | ENSG00000117614 | SYF2 | −1.731052005 | − |
| 26 | 936 | 18274 | chr5 | 56542126 | 56545403 | ENSG00000062194 | GPBP1 | −1.697565149 | − |
| 27 | 937 | 20658 | chr7 | 72879768 | 72880731 | ENSG00000009954 | BAZ1B | −1.683472553 | − |
| 28 | 938 | 20552 | chr7 | 44739739 | 44741214 | ENSG00000105953 | OGDH | −1.662553273 | − |
| 29 | 939 | 03293 | chr10 | 70190192 | 70190417 | ENSG00000138346 | DNA2 | −1.660365542 | − |
| 30 | 940 | 22764 | chr9 | 96233422 | 96261168 | ENSG00000048828 | FAM120A | −1.651553618 | − |
| 31 | 941 | 15662 | chr3 | 196118683 | 196120490 | ENSG00000163960 | UBXN7 | −1.647242297 | − |
| 32 | 942 | 04222 | chr11 | 3752620 | 3752808 | ENSG00000110713 | NUP98 | −1.638985251 | − |
| 33 | 943 | 08121 | chr15 | 59204761 | 59205895 | ENSG00000137776 | SLTM | −1.610197017 | − |
| 34 | 944 | 13514 | chr2 | 99786012 | 99787892 | ENSG00000158411 | MITD1 | −1.603567451 | − |
| 35 | 945 | 22065 | chr9 | 126519981 | 126531842 | ENSG00000119522 | DENND1A | −1.603263457 | − |
| 36 | 946 | 21136 | chr8 | 131302246 | 131370389 | ENSG00000153317 | ASAP1 | −1.594570417 | − |
| 37 | 947 | 07290 | chr14 | 56114742 | 56115588 | ENSG00000126777 | KTN1 | −1.593658506 | − |
| 38 | 948 | 21493 | chr8 | 42914234 | 42919358 | ENSG00000168522 | FNTA | −1.591101491 | − |
| 39 | 949 | 02565 | chr10 | 105767934 | 105778666 | ENSG00000065613 | SLK | −1.571637751 | − |
| 40 | 950 | 13738 | chr20 | 35672488 | 35672653 | ENSG00000080839 | RBL1 | −1.533251478 | − |
| 41 | 951 | 09181 | chr16 | 69729038 | 69729282 | ENSG00000102908 | NFAT5 | −1.510313578 | − |
| 42 | 952 | 10581 | chr18 | 20516716 | 20529676 | ENSG00000101773 | RBBP8 | −1.491646626 | − |
| 43 | 953 | 16418 | chr4 | 110412482 | 110416012 | ENSG00000138802 | SEC24B | −1.48101895 | − |
| 44 | 954 | 00480 | chr1 | 15964801 | 15970145 | ENSG00000197312 | DDI2 | −1.471661901 | − |
| 45 | 955 | 07128 | chr14 | 50136241 | 50141145 | ENSG00000100479 | POLE2 | −1.461703503 | − |
| 46 | 956 | 09687 | chr17 | 34937773 | 34937968 | ENSG00000005955 | GGNBP2 | −1.455641381 | − |
| 47 | 957 | 04374 | chr11 | 5247878 | 5248265 | ENSG00000244734 | HBB | 1.44536348 | + |
| 48 | 958 | 11059 | chr19 | 10286215 | 10288043 | ENSG00000130816 | DNMT1 | −1.420159643 | − |
| 49 | 959 | 21189 | chr8 | 141595217 | 141616013 | ENSG00000123908 | AGO2 | −1.420022161 | − |
| 50 | 960 | 20250 | chr7 | 151946960 | 151948051 | ENSG00000055609 | KMT2C | −1.415607268 | − |
| 51 | 961 | 20208 | chr7 | 148516069 | 148516779 | ENSG00000106462 | EZH2 | −1.408045344 | − |
| 52 | 962 | 02272 | chr1 | 78200031 | 78201843 | ENSG00000077254 | USP33 | −1.398984454 | − |
| 53 | 963 | 00711 | chr1 | 1747194 | 1756938 | ENSG00000078369 | GNB1 | −1.381859545 | − |
| 54 | 964 | 19568 | chr6 | 56989531 | 56999668 | ENSG00000112200 | ZNF451 | −1.374430798 | − |
| 55 | 965 | 01141 | chr1 | 212218001 | 212220759 | ENSG00000143476 | DTL | −1.37418011 | − |
| 56 | 966 | 02693 | chr10 | 120797749 | 120797951 | ENSG00000107581 | EIF3A | −1.371606407 | − |
| 57 | 967 | 14089 | chr21 | 17135209 | 17138460 | ENSG00000155313 | USP25 | −1.370800154 | − |
| 58 | 968 | 08653 | chr15 | 93540186 | 93541851 | ENSG00000173575 | CHD2 | −1.363982557 | − |
| 59 | 969 | 04712 | chr11 | 77402203 | 77404656 | ENSG00000048649 | RSF1 | −1.347797823 | − |
| 60 | 970 | 06433 | chr13 | 41517087 | 41518061 | ENSG00000120690 | ELF1 | −1.329949423 | − |
| 61 | 971 | 04231 | chr11 | 3789810 | 3789974 | ENSG00000110713 | NUP98 | −1.328958073 | − |
| 62 | 972 | 15257 | chr3 | 160131260 | 160132305 | ENSG00000113810 | SMC4 | −1.327632403 | − |
| 63 | 973 | 08264 | chr15 | 64791491 | 64792365 | ENSG00000180357 | ZNF609 | −1.323996695 | − |
| 64 | 974 | 19854 | chr7 | 101870646 | 101870949 | ENSG00000257923 | CUX1 | −1.323311249 | − |
| 65 | 975 | 17166 | chr4 | 56877577 | 56878151 | ENSG00000174799 | CEP135 | −1.312060145 | − |
| 66 | 976 | 04708 | chr11 | 77394754 | 77396204 | ENSG00000048649 | RSF1 | −1.308996537 | − |
| 67 | 977 | 06000 | chr12 | 89853414 | 89866052 | ENSG00000139323 | POC1B | −1.305211994 | − |
| 68 | 978 | 19065 | chr6 | 150092297 | 150094305 | ENSG00000120265 | PCMT1 | −1.285715752 | − |
| 69 | 979 | 01612 | chr1 | 28362054 | 28384605 | ENSG00000158161 | EYA3 | −1.283006706 | − |
| 70 | 980 | 07213 | chr14 | 50952295 | 50952912 | ENSG00000012983 | MAP4K5 | −1.277430489 | − |
| 71 | 981 | 02010 | chr1 | 52293467 | 52299842 | ENSG00000078618 | NRD1 | −1.265951283 | − |
| 72 | 982 | 10749 | chr18 | 39607406 | 39629569 | ENSG00000078142 | PIK3C3 | −1.244972909 | − |
| 73 | 983 | 12347 | chr2 | 203921149 | 203922176 | ENSG00000144426 | NBEAL1 | −1.238573412 | − |
| 74 | 984 | 10987 | chr18 | 9195548 | 9221997 | ENSG00000101745 | ANKRD12 | 1.23352635 | + |
| 75 | 985 | 01864 | chr1 | 41536266 | 41541123 | ENSG00000010803 | SCMH1 | −1.230203935 | − |
| 76 | 986 | 20724 | chr7 | 7826418 | 7841374 | ENSG00000219545 | RPA3-AS1 | −1.228982871 | − |
| 77 | 987 | 22400 | chr9 | 33960823 | 33963789 | ENSG00000137073 | UBAP2 | −1.228711515 | − |
| 78 | 988 | 02152 | chr1 | 63944434 | 63955889 | ENSG00000142856 | ITGB3BP | −1.22179497 | − |
| 79 | 989 | 16992 | chr4 | 39839475 | 39843676 | ENSG00000121892 | PDS5A | −1.219666561 | − |
| 80 | 990 | 04329 | chr11 | 47774467 | 47776216 | ENSG00000109920 | FNBP4 | −1.21886247 | − |
| 81 | 991 | 10286 | chr17 | 61841375 | 61842207 | ENSG00000108588 | CCDC47 | −1.215198124 | − |
| 82 | 992 | 13162 | chr2 | 61340904 | 61345251 | ENSG00000162929 | KIAA1841 | −1.213144359 | − |
| 83 | 993 | 01070 | chr1 | 205585605 | 205593019 | ENSG00000158711 | ELK4 | −1.208469007 | − |
| 84 | 994 | 11293 | chr19 | 39943995 | 39944161 | ENSG00000196235 | SUPT5H | −1.201547806 | − |
| 85 | 995 | 02313 | chr1 | 87181406 | 87185318 | ENSG00000097033 | SH3GLB1 | −1.194484292 | − |
| 86 | 996 | 11596 | chr2 | 113057425 | 113057606 | ENSG00000188177 | ZC3H6 | −1.192203498 | − |
| 87 | 997 | 15955 | chr3 | 44835708 | 44835918 | ENSG00000163808 | KIF15 | −1.18998281 | − |
| 88 | 998 | 07534 | chr14 | 81297486 | 81307112 | ENSG00000100629 | CEP128 | −1.187560558 | − |
| 89 | 999 | 00616 | chr1 | 171537385 | 171544267 | ENSG00000117523 | PRRC2C | −1.187049294 | − |
| 90 | 1000 | 01909 | chr1 | 46105881 | 46108171 | ENSG00000159592 | GPBP1L1 | −1.185137589 | − |
| 91 | 1001 | 04787 | chr11 | 85707868 | 85742653 | ENSG00000073921 | PICALM | 1.180129801 | + |
| 92 | 1002 | 11447 | chr19 | 57967020 | 57967550 | ENSG00000268163 | AC004076.9 | −1.173577839 | − |
| 93 | 1003 | 16169 | chr3 | 56661064 | 56662642 | ENSG00000163946 | FAM208A | −1.172753372 | − |
| 94 | 1004 | 09079 | chr16 | 58594115 | 58594266 | ENSG00000125107 | CNOT1 | −1.17086243 | − |
| 95 | 1005 | 00804 | chr1 | 180366650 | 180382606 | ENSG00000135847 | ACBD6 | −1.16836055 | − |
| 96 | 1006 | 13521 | chr2 | 99985854 | 99988193 | ENSG00000158417 | EIF5B | −1.167808075 | − |
| 97 | 1007 | 02559 | chr10 | 105197771 | 105198565 | ENSG00000148843 | PDCD11 | −1.166398697 | − |
| 98 | 1008 | 06318 | chr13 | 28155433 | 28155940 | ENSG00000139517 | LNX2 | −1.162993126 | − |
| 99 | 1009 | 11563 | chr2 | 109067483 | 109068922 | ENSG00000135968 | GCC2 | −1.162334985 | − |
| 100 | 1010 | 02763 | chr10 | 126631025 | 126631876 | ENSG00000249456 | RP11- | 1.159634216 | + |
| | | | | | | | 298J20.4 | | |
| 101 | 1011 | 10253 | chr17 | 600657 | 602620 | ENSG00000141252 | VPS53 | −1.155561006 | − |
| 102 | 1012 | 14888 | chr3 | 129599151 | 129599402 | ENSG00000172765 | TMCC1 | −1.151076826 | − |
| 103 | 1013 | 00354 | chr1 | 154207066 | 154207767 | ENSG00000143569 | UBAP2L | −1.150469707 | − |
| 104 | 1014 | 22404 | chr9 | 33971648 | 33973235 | ENSG00000137073 | UBAP2 | −1.146045034 | − |
| 105 | 1015 | 05176 | chr12 | 116668337 | 116669961 | ENSG00000123066 | MED13L | −1.143723652 | − |
| 106 | 1016 | 01113 | chr1 | 21083658 | 21100103 | ENSG00000127483 | HP1BP3 | −1.142758789 | − |
| 107 | 1017 | 13008 | chr2 | 44729827 | 44732869 | ENSG00000143919 | CAMKMT | −1.14151883 | − |
| 108 | 1018 | 16696 | chr4 | 153874650 | 153875471 | ENSG00000137460 | FHDC1 | −1.13092216 | − |
| 109 | 1019 | 17750 | chr5 | 138699447 | 138700432 | ENSG00000120727 | PAIP2 | −1.125871509 | − |
| 110 | 1020 | 19832 | chr6 | 99912479 | 99916494 | ENSG00000123552 | USP45 | 1.125162796 | + |
| 111 | 1021 | 22387 | chr9 | 33948371 | 33948585 | ENSG00000137073 | UBAP2 | −1.118516346 | − |
| 112 | 1022 | 01075 | chr1 | 205696827 | 205698749 | ENSG00000069275 | NUCKS1 | −1.112909385 | − |
| 113 | 1023 | 22554 | chr9 | 5944870 | 5954095 | ENSG00000183354 | KIAA2026 | −1.112044692 | − |
| 114 | 1024 | 05081 | chr12 | 112116954 | 112121111 | ENSG00000089234 | BRAP | −1.108105518 | − |
| 115 | 1025 | 07080 | chr14 | 45587230 | 45599993 | ENSG00000100442 | FKBP3 | −1.107688517 | − |
| 116 | 1026 | 06866 | chr14 | 23378691 | 23380612 | ENSG00000100461 | RBM23 | −1.10744325 | − |
| 117 | 1027 | 12525 | chr2 | 227729319 | 227732034 | ENSG00000144468 | RHBDD1 | −1.099283508 | − |
| 118 | 1028 | 12560 | chr2 | 231307651 | 231314970 | ENSG00000067066 | SP100 | −1.092112695 | − |
| 119 | 1029 | 15719 | chr3 | 197592293 | 197602646 | ENSG00000186001 | LRCH3 | −1.089664619 | − |
| 120 | 1030 | 00593 | chr1 | 169767997 | 169770112 | ENSG00000000460 | C1orf112 | −1.08419511 | − |
| 121 | 1031 | 07174 | chr14 | 50616725 | 50616948 | ENSG00000100485 | SOS2 | −1.081425815 | − |
| 122 | 1032 | 18626 | chr5 | 93964515 | 93966448 | ENSG00000133302 | ANKRD32 | 1.073184987 | + |
| 123 | 1033 | 19248 | chr6 | 20781375 | 20846409 | ENSG00000145996 | CDKAL1 | −1.072369586 | − |
| 124 | 1034 | 04914 | chr12 | 102107867 | 102110590 | ENSG00000111666 | CHPT1 | −1.062669426 | − |
| 125 | 1035 | 04376 | chr11 | 5247941 | 5248230 | ENSG00000244734 | HBB | 1.059317293 | + |
| 126 | 1036 | 15734 | chr3 | 20113075 | 20113951 | ENSG00000114166 | KAT2B | −1.059120544 | − |
| 127 | 1037 | 16067 | chr3 | 49372452 | 49373029 | ENSG00000114316 | USP4 | −1.057601335 | − |
| 128 | 1038 | 17988 | chr5 | 176402396 | 176409624 | ENSG00000087206 | UIMC1 | −1.057060246 | − |
| 129 | 1039 | 00386 | chr1 | 155408117 | 155429689 | ENSG00000116539 | ASH1L | −1.056345461 | − |
| 130 | 1040 | 20264 | chr7 | 155457868 | 155473602 | ENSG00000184863 | RBM33 | −1.052207723 | − |
| 131 | 1041 | 20916 | chr8 | 100515063 | 100523740 | ENSG00000132549 | VPS13B | −1.050303405 | − |
| 132 | 1042 | 02796 | chr10 | 13214375 | 13214765 | ENSG00000065328 | MCM10 | −1.042082127 | − |
| 133 | 1043 | 20002 | chr7 | 117825700 | 117828459 | ENSG00000128534 | NAA38 | −1.041810719 | − |
| 134 | 1044 | 12270 | chr2 | 202010100 | 202014558 | ENSG00000003402 | CFLAR | −1.036011434 | − |
| 135 | 1045 | 23007 | chrX | 149983334 | 149984551 | ENSG00000102181 | CD99L2 | −1.033978093 | − |
| 136 | 1046 | 09230 | chr16 | 71712657 | 71715808 | ENSG00000040199 | PHLPP2 | −1.031262858 | − |
| 137 | 1047 | 22401 | chr9 | 33960823 | 33973235 | ENSG00000137073 | UBAP2 | −1.027473832 | − |
| 138 | 1048 | 07006 | chr14 | 35331249 | 35331528 | ENSG00000198604 | BAZ1A | −1.022185742 | − |
| 139 | 1049 | 14241 | chr21 | 38792600 | 38794168 | ENSG00000157540 | DYRK1A | −1.021673056 | − |
| 140 | 1050 | 16836 | chr4 | 178274461 | 178274882 | ENSG00000109674 | NEIL3 | −1.016081081 | − |
| 141 | 1051 | 10887 | chr18 | 60206913 | 60217693 | ENSG00000141664 | ZCCHC2 | −1.009357969 | − |
| 142 | 1052 | 22986 | chrX | 13684435 | 13698717 | ENSG00000176896 | TCEANC | 1.007062962 | + |
| 143 | 1053 | 06929 | chr14 | 31404368 | 31425448 | ENSG00000196792 | STRN3 | −1.003076508 | − |
| 144 | 1054 | 07056 | chr14 | 39627488 | 39628754 | ENSG00000182400 | TRAPPC6B | −1.001831479 | − |
| 145 | 1055 | 19098 | chr6 | 155095122 | 155099179 | ENSG00000213079 | SCAF8 | −1.000738262 | − |
| 146 | 1056 | 03734 | chr11 | 108098321 | 108100050 | ENSG00000149311 | ATM | −0.995255586 | − |
| 147 | 1057 | 02126 | chr1 | 62907158 | 62907970 | ENSG00000162607 | USP1 | −0.994146093 | − |
| 148 | 1058 | 21287 | chr8 | 21835280 | 21837714 | ENSG00000130227 | XPO7 | −0.993409908 | − |
| 149 | 1059 | 15062 | chr3 | 142116170 | 142123918 | ENSG00000114127 | XRN1 | −0.991091493 | − |
| 150 | 1060 | 20509 | chr7 | 36450122 | 36450775 | ENSG00000011426 | ANLN | −0.985382926 | − |
| 151 | 1061 | 10756 | chr18 | 39623696 | 39629569 | ENSG00000078142 | PIK3C3 | −0.980136493 | − |
| 152 | 1062 | 20561 | chr7 | 48541721 | 48542148 | ENSG00000179869 | ABCA13 | 0.978360837 | + |
| 153 | 1063 | 08654 | chr15 | 93540186 | 93545547 | ENSG00000173575 | CHD2 | 0.978292944 | + |
| 154 | 1064 | 08778 | chr16 | 148142 | 150507 | ENSG00000103148 | NPRL3 | 0.975426406 | + |
| 155 | 1065 | 02929 | chr10 | 22896855 | 22898646 | ENSG00000150867 | PIP4K2A | −0.9722031 | − |
| 156 | 1066 | 17110 | chr4 | 52729602 | 52758017 | ENSG00000109184 | DCUN1D4 | −0.966161676 | − |
| 157 | 1067 | 09420 | chr17 | 1746096 | 1747980 | ENSG00000132383 | RPA1 | −0.962147895 | − |
| 158 | 1068 | 04015 | chr11 | 16205431 | 16256217 | ENSG00000110693 | SOX6 | −0.961209315 | − |
| 159 | 1069 | 21439 | chr8 | 41518947 | 41519459 | ENSG00000029534 | ANK1 | −0.957238337 | − |
| 160 | 1070 | 19011 | chr6 | 146209155 | 146216113 | ENSG00000146414 | SHPRH | 0.956350194 | + |
| 161 | 1071 | 08356 | chr15 | 66044716 | 66053776 | ENSG00000174485 | DENND4A | −0.953555637 | − |
| 162 | 1072 | 09604 | chr17 | 29112936 | 29113049 | ENSG00000176390 | CRLF3 | −0.952318815 | − |
| 163 | 1073 | 13634 | chr20 | 32619327 | 32621124 | ENSG00000125970 | RALY | −0.952059983 | − |
| 164 | 1074 | 20447 | chr7 | 27824781 | 27825108 | ENSG00000106052 | TAX1BP1 | −0.951551903 | − |
| 165 | 1075 | 09322 | chr16 | 85667519 | 85667738 | ENSG00000131149 | GSE1 | −0.950544843 | − |
| 166 | 1076 | 20382 | chr7 | 23224688 | 23224917 | ENSG00000136243 | NUPL2 | −0.948456687 | − |
| 167 | 1077 | 01675 | chr1 | 29319841 | 29320054 | ENSG00000159023 | EPB41 | −0.947371967 | − |
| 168 | 1078 | 01264 | chr1 | 222897433 | 222898897 | ENSG00000162819 | BROX | −0.944435092 | − |
| 169 | 1079 | 09473 | chr17 | 20107645 | 20109225 | ENSG00000128487 | SPECC1 | 0.943075221 | + |
| 170 | 1080 | 04559 | chr11 | 68318588 | 68331900 | ENSG00000110075 | PPP6R3 | −0.940969479 | − |
| 171 | 1081 | 19673 | chr6 | 76357446 | 76369123 | ENSG00000112701 | SENP6 | −0.93979093 | − |
| 172 | 1082 | 15335 | chr3 | 169854206 | 169867032 | ENSG00000173889 | PHC3 | −0.93370794 | − |
| 173 | 1083 | 14366 | chr22 | 22160138 | 22162135 | ENSG00000100030 | MAPK1 | −0.932412536 | − |
| 174 | 1084 | 01252 | chr1 | 22047528 | 22048257 | ENSG00000090686 | USP48 | −0.92708516 | − |
| 175 | 1085 | 22466 | chr9 | 36375930 | 36376124 | ENSG00000137075 | RNF38 | −0.912116226 | − |
| 176 | 1086 | 01676 | chr1 | 29319841 | 29323831 | ENSG00000159023 | EPB41 | −0.907484412 | − |
| 177 | 1087 | 05433 | chr12 | 1863423 | 1863680 | ENSG00000006831 | ADIPOR2 | −0.906782889 | − |
| 178 | 1088 | 16984 | chr4 | 39739039 | 39757359 | ENSG00000078140 | UBE2K | −0.906655604 | − |
| 179 | 1089 | 18946 | chr6 | 13632601 | 13644961 | ENSG00000010017 | RANBP9 | −0.905997471 | − |
| 180 | 1090 | 22377 | chr9 | 33932559 | 33933626 | ENSG00000137073 | UBAP2 | −0.904013554 | − |
| 181 | 1091 | 15300 | chr3 | 169693395 | 169706147 | ENSG00000008952 | SEC62 | −0.890692839 | − |
| 182 | 1092 | 08660 | chr15 | 93543741 | 93558139 | ENSG00000173575 | CHD2 | −0.889550329 | − |
| 183 | 1093 | 01562 | chr1 | 25666964 | 25669564 | ENSG00000183726 | TMEM50A | −0.887890585 | − |
| 184 | 1094 | 09996 | chr17 | 48828107 | 48828723 | ENSG00000108848 | LUC7L3 | −0.887692142 | − |
| 185 | 1095 | 10763 | chr18 | 43319127 | 43319627 | ENSG00000141469 | SLC14A1 | −0.887285198 | − |
| 186 | 1096 | 05073 | chr12 | 112096539 | 112097149 | ENSG00000089234 | BRAP | −0.886768771 | − |
| 187 | 1097 | 20330 | chr7 | 16298014 | 16317851 | ENSG00000214960 | ISPD | −0.884134047 | − |
| 188 | 1098 | 01568 | chr1 | 25678116 | 25679465 | ENSG00000183726 | TMEM50A | −0.882062038 | − |
| 189 | 1099 | 04367 | chr11 | 5246893 | 5247941 | ENSG00000244734 | HBB | −0.881298453 | − |
| 190 | 1100 | 21442 | chr8 | 41519318 | 41521260 | ENSG00000029534 | ANK1 | −0.878728778 | − |
| 191 | 1101 | 15809 | chr3 | 3178943 | 3186394 | ENSG00000072756 | TRNT1 | −0.873695283 | − |
| 192 | 1102 | 08775 | chr16 | 14720962 | 14721193 | ENSG00000140694 | PARN | −0.873513356 | − |
| 193 | 1103 | 01596 | chr1 | 28116072 | 28120143 | ENSG00000117758 | STX12 | −0.873353301 | − |
| 194 | 1104 | 15618 | chr3 | 195791179 | 195796439 | ENSG00000072274 | TFRC | 0.865977004 | + |
| 195 | 1105 | 04371 | chr11 | 5247806 | 5254322 | ENSG00000244734 | HBB | −0.861493375 | − |
| 196 | 1106 | 17540 | chr5 | 112321531 | 112339774 | ENSG00000172795 | DCP2 | −0.859873285 | − |
| 197 | 1107 | 02864 | chr10 | 17645558 | 17646046 | ENSG00000165996 | PTPLA | −0.856912854 | − |
| 198 | 1108 | 11369 | chr19 | 48660270 | 48660397 | ENSG00000105486 | LIG1 | −0.855477996 | − |
| 199 | 1109 | 19205 | chr6 | 17646297 | 17649531 | ENSG00000124789 | NUP153 | −0.851513363 | − |
| 200 | 1110 | 17131 | chr4 | 54280781 | 54294350 | ENSG00000145216 | FIP1L1 | −0.850581558 | − |
| 201 | 1111 | 14060 | chr20 | 6011930 | 6012726 | ENSG00000088766 | CRLS1 | −0.849745579 | − |
| 202 | 1112 | 04999 | chr12 | 109046047 | 109048186 | ENSG00000110880 | CORO1C | −0.845189707 | − |
| 203 | 1113 | 09815 | chr17 | 40652724 | 40653322 | ENSG00000033627 | ATP6V0A1 | −0.843836528 | − |
| 204 | 1114 | 07981 | chr15 | 50592985 | 50593565 | ENSG00000104064 | GABPB1 | −0.836914748 | − |
| 205 | 1115 | 17411 | chr4 | 89859238 | 89870589 | ENSG00000138640 | FAM13A | −0.834816404 | − |
| 206 | 1116 | 01550 | chr1 | 24840803 | 24841057 | ENSG00000117602 | RCAN3 | −0.833705319 | − |
| 207 | 1117 | 04237 | chr11 | 3794861 | 3797251 | ENSG00000110713 | NUP98 | −0.833473306 | − |
| 208 | 1118 | 06459 | chr13 | 42040958 | 42042974 | ENSG00000102760 | RGCC | −0.833444657 | − |
| 209 | 1119 | 22388 | chr9 | 33948371 | 33953472 | ENSG00000137073 | UBAP2 | −0.832464951 | − |
| 210 | 1120 | 19582 | chr6 | 57017018 | 57025950 | ENSG00000112200 | ZNF451 | 0.832178254 | + |
| 211 | 1121 | 02407 | chr1 | 93683294 | 93692006 | ENSG00000122483 | CCDC18 | −0.830332399 | − |
| 212 | 1122 | 23137 | chrX | 53641494 | 53642796 | ENSG00000086758 | HUWE1 | −0.828040183 | − |
| 213 | 1123 | 13589 | chr20 | 2944917 | 2945848 | ENSG00000132670 | PTPRA | −0.825864753 | − |
| 214 | 1124 | 14585 | chr22 | 41531816 | 41536261 | ENSG00000100393 | EP300 | −0.82395501 | − |
| 215 | 1125 | 02974 | chr10 | 27453992 | 27454468 | ENSG00000120539 | MASTL | −0.822978236 | − |
| 216 | 1126 | 13436 | chr2 | 8910799 | 8917022 | ENSG00000134313 | KIDINS220 | 0.822565477 | + |
| 217 | 1127 | 12752 | chr2 | 26321530 | 26332775 | ENSG00000084733 | RAB10 | −0.821885553 | − |
| 218 | 1128 | 21087 | chr8 | 131092147 | 131104389 | ENSG00000153317 | ASAP1 | −0.82162602 | − |
| 219 | 1129 | 02599 | chr10 | 1125950 | 1126416 | ENSG00000047056 | WDR37 | −0.821547428 | − |
| 220 | 1130 | 02264 | chr1 | 78177431 | 78178966 | ENSG00000077254 | USP33 | −0.821465245 | − |
| 221 | 1131 | 06099 | chr12 | 96692646 | 96694138 | ENSG00000059758 | CDK17 | −0.820285575 | − |
| 222 | 1132 | 03159 | chr10 | 49609654 | 49618211 | ENSG00000107643 | MAPK8 | 0.818623607 | + |
| 223 | 1133 | 06939 | chr14 | 31420068 | 31425448 | ENSG00000196792 | STRN3 | −0.818620248 | − |
| 224 | 1134 | 17748 | chr5 | 138614015 | 138614818 | ENSG00000015479 | MATR3 | −0.81818695 | − |
| 225 | 1135 | 06781 | chr14 | 103871412 | 103871604 | ENSG00000075413 | MARK3 | −0.817182929 | − |
| 226 | 1136 | 09698 | chr17 | 35800605 | 35800763 | ENSG00000108264 | TADA2A | −0.81705738 | − |
| 227 | 1137 | 12901 | chr2 | 37426846 | 37428869 | ENSG00000218739 | CEBPZ-AS1 | −0.816983939 | − |
| 228 | 1138 | 11110 | chr19 | 13039155 | 13039661 | ENSG00000179115 | FARSA | −0.815139146 | − |
| 229 | 1139 | 15689 | chr3 | 196876613 | 196888609 | ENSG00000075711 | DLG1 | −0.812904778 | − |
| 230 | 1140 | 00858 | chr1 | 185143503 | 185144245 | ENSG00000116668 | SWT1 | −0.812024383 | − |
| 231 | 1141 | 10248 | chr17 | 60061531 | 60062451 | ENSG00000108510 | MED13 | −0.811297795 | − |
| 232 | 1142 | 16838 | chr4 | 178274461 | 178281831 | ENSG00000109674 | NEIL3 | −0.810885238 | − |
| 233 | 1143 | 06571 | chr13 | 50642232 | 50649789 | ENSG00000231607 | DLEU2 | −0.810759762 | − |
| 234 | 1144 | 01959 | chr1 | 50956259 | 51001129 | ENSG00000185104 | FAF1 | −0.806879972 | − |
| 235 | 1145 | 05880 | chr12 | 69107644 | 69108533 | ENSG00000111581 | NUP107 | −0.803562204 | − |
| 236 | 1146 | 13163 | chr2 | 61343113 | 61345251 | ENSG00000162929 | KIAA1841 | −0.802619965 | − |
| 237 | 1147 | 07836 | chr15 | 41961025 | 41962156 | ENSG00000174197 | MGA | −0.801902039 | − |
| 238 | 1148 | 19213 | chr6 | 17665469 | 17669259 | ENSG00000124789 | NUP153 | −0.800253252 | − |
| 239 | 1149 | 04007 | chr11 | 16133348 | 16208501 | ENSG00000110693 | SOX6 | −0.796576061 | − |
| 240 | 1150 | 06028 | chr12 | 93192667 | 93192862 | ENSG00000102189 | EEA1 | −0.795690495 | − |
| 241 | 1151 | 20626 | chr7 | 65592690 | 65599361 | ENSG00000241258 | CRCP | −0.795534527 | − |
| 242 | 1152 | 10962 | chr18 | 76953182 | 76974038 | ENSG00000166377 | ATP9B | −0.792877388 | − |
| 243 | 1153 | 13660 | chr20 | 33065576 | 33067594 | ENSG00000078747 | ITCH | −0.790880218 | − |
| 244 | 1154 | 15338 | chr3 | 169863210 | 169867032 | ENSG00000173889 | PHC3 | −0.789693985 | − |
| 245 | 1155 | 07828 | chr15 | 41667909 | 41669502 | ENSG00000137804 | NUSAP1 | −0.788962664 | − |
| 246 | 1156 | 17980 | chr5 | 176370335 | 176385155 | ENSG00000087206 | UIMC1 | −0.788756125 | − |
| 247 | 1157 | 14085 | chr21 | 16386664 | 16415895 | ENSG00000180530 | NRIP1 | −0.78857849 | − |
| 248 | 1158 | 21017 | chr8 | 124089350 | 124117704 | ENSG00000156787 | TBC1D31 | −0.787817422 | − |
| 249 | 1159 | 15597 | chr3 | 195785154 | 195785503 | ENSG00000072274 | TFRC | −0.787214727 | − |
| 250 | 1160 | 17066 | chr4 | 48371865 | 48385801 | ENSG00000109171 | SLAIN2 | −0.785855689 | − |
| 251 | 1161 | 10120 | chr17 | 57274904 | 57275150 | ENSG00000068489 | PRR11 | −0.78426978 | − |
| 252 | 1162 | 13524 | chr20 | 10536878 | 10541468 | ENSG00000149346 | SLX4IP | −0.782760423 | − |
| 253 | 1163 | 21766 | chr8 | 95549330 | 95550574 | ENSG00000164944 | KIAA1429 | −0.781355288 | − |
| 254 | 1164 | 13231 | chr2 | 61749745 | 61753656 | ENSG00000082898 | XPO1 | −0.781098538 | − |
| 255 | 1165 | 14042 | chr20 | 57014000 | 57016139 | ENSG00000124164 | VAPB | −0.780718257 | − |
| 256 | 1166 | 16116 | chr3 | 52446826 | 52448603 | ENSG00000010318 | PHF7 | −0.780597733 | − |
| 257 | 1167 | 21279 | chr8 | 21832180 | 21835354 | ENSG00000130227 | XPO7 | −0.778597658 | − |
| 258 | 1168 | 03652 | chr10 | 98618048 | 98667504 | ENSG00000196233 | LCOR | −0.775538046 | − |
| 259 | 1169 | 11792 | chr2 | 144966169 | 144969146 | ENSG00000121964 | GTDC1 | −0.771184033 | − |
| 260 | 1170 | 03028 | chr10 | 31749965 | 31750166 | ENSG00000148516 | ZEB1 | −0.771152714 | − |
| 261 | 1171 | 11627 | chr2 | 11426664 | 11427862 | ENSG00000134318 | ROCK2 | −0.768728393 | − |
| 262 | 1172 | 09942 | chr17 | 45479497 | 45492285 | ENSG00000178852 | EFCAB13 | 0.768679343 | + |
| 263 | 1173 | 10858 | chr18 | 55278868 | 55283207 | ENSG00000134440 | NARS | −0.767365826 | − |
| 264 | 1174 | 07253 | chr14 | 55423751 | 55424353 | ENSG00000198554 | WDHD1 | −0.766525169 | − |
| 265 | 1175 | 21408 | chr8 | 37623043 | 37623873 | ENSG00000147471 | PROSC | −0.765299565 | − |
| 266 | 1176 | 01316 | chr1 | 224599128 | 224601037 | ENSG00000162923 | WDR26 | −0.765061353 | − |
| 267 | 1177 | 06007 | chr12 | 89860546 | 89866052 | ENSG00000139323 | POC1B | −0.759596201 | − |
| 268 | 1178 | 07054 | chr14 | 39623414 | 39627606 | ENSG00000182400 | TRAPPC6B | −0.757655748 | − |
| 269 | 1179 | 18441 | chr5 | 72311452 | 72333042 | ENSG00000157107 | FCHO2 | 0.755970771 | + |
| 270 | 1180 | 00400 | chr1 | 155695172 | 155695810 | ENSG00000132676 | DAP3 | −0.755813418 | − |
| 271 | 1181 | 02388 | chr1 | 93648916 | 93659301 | ENSG00000122483 | CCDC18 | −0.751924076 | − |
| 272 | 1182 | 00200 | chr1 | 117944807 | 117984947 | ENSG00000198162 | MAN1A2 | −0.74921634 | − |
| 273 | 1183 | 05156 | chr12 | 112798183 | 112798315 | ENSG00000173064 | HECTD4 | 0.748188995 | + |
| 274 | 1184 | 02650 | chr10 | 11639629 | 11643979 | ENSG00000148429 | USP6NL | −0.748046374 | − |
| 275 | 1185 | 05799 | chr12 | 62743001 | 62749256 | ENSG00000135655 | USP15 | −0.748037916 | − |
| 276 | 1186 | 09092 | chr16 | 66764014 | 66766408 | ENSG00000135720 | DYNC1LI2 | −0.745511259 | − |
| 277 | 1187 | 10929 | chr18 | 74561481 | 74563895 | ENSG00000130856 | ZNF236 | −0.744223622 | − |
| 278 | 1188 | 21056 | chr8 | 124392768 | 124392917 | ENSG00000156802 | ATAD2 | −0.73775191 | − |
| 279 | 1189 | 01937 | chr1 | 47745912 | 47748131 | ENSG00000123473 | STIL | −0.737462925 | − |
| 280 | 1190 | 08702 | chr16 | 11114049 | 11154879 | ENSG00000038532 | CLEC16A | −0.733977011 | − |
| 281 | 1191 | 00443 | chr1 | 158624600 | 158624741 | ENSG00000163554 | SPTA1 | −0.733664113 | − |
| 282 | 1192 | 19873 | chr7 | 102962378 | 102963241 | ENSG00000105821 | DNAJC2 | −0.733541673 | − |
| 283 | 1193 | 02286 | chr1 | 7837219 | 7838229 | ENSG00000049245 | VAMP3 | −0.731067513 | − |
| 284 | 1194 | 07308 | chr14 | 58690339 | 58690574 | ENSG00000131966 | ACTR10 | −0.72935942 | − |
| 285 | 1195 | 20485 | chr7 | 32672154 | 32678977 | ENSG00000229358 | DPY19L1P1 | 0.72562903 | + |
| 286 | 1196 | 00417 | chr1 | 156303337 | 156304709 | ENSG00000163468 | CCT3 | −0.724202091 | − |
| 287 | 1197 | 22727 | chr9 | 88920106 | 88924932 | ENSG00000083223 | ZCCHC6 | −0.722435269 | − |
| 288 | 1198 | 07807 | chr15 | 41361767 | 41362745 | ENSG00000128908 | INO80 | −0.722342802 | − |
| 289 | 1199 | 15663 | chr3 | 196118683 | 196129890 | ENSG00000163960 | UBXN7 | −0.718770738 | − |
| 290 | 1200 | 11682 | chr2 | 122514815 | 122516382 | ENSG00000211460 | TSN | −0.717149492 | − |
| 291 | 1201 | 18087 | chr5 | 32135677 | 32143986 | ENSG00000113384 | GOLPH3 | −0.71686075 | − |
| 292 | 1202 | 15886 | chr3 | 37170553 | 37190529 | ENSG00000093167 | LRRFIP2 | −0.7148495 | − |
| 293 | 1203 | 15146 | chr3 | 149563797 | 149639014 | ENSG00000082996 | RNF13 | −0.712343388 | − |
| 294 | 1204 | 23244 | chrX | 77270158 | 77275895 | ENSG00000165240 | ATP7A | 0.712089225 | + |
| 295 | 1205 | 07646 | chr14 | 96986391 | 96987409 | ENSG00000090060 | PAPOLA | −0.711582141 | − |
| 296 | 1206 | 09875 | chr17 | 4186092 | 4200109 | ENSG00000132388 | UBE2G1 | −0.71126388 | − |
| 297 | 1207 | 01638 | chr1 | 28907071 | 28907741 | ENSG00000197989 | SNHG12 | −0.710805666 | − |
| 298 | 1208 | 20189 | chr7 | 141752583 | 141778270 | ENSG00000257335 | MGAM | 0.710063558 | + |
| 299 | 1209 | 00276 | chr1 | 150198939 | 150201570 | ENSG00000143401 | ANP32E | −0.710010473 | − |
| 300 | 1210 | 08220 | chr15 | 63988322 | 64008672 | ENSG00000103657 | HERC1 | −0.709650893 | − |
| 301 | 1211 | 10863 | chr18 | 55833019 | 55919286 | ENSG00000049759 | NEDD4L | −0.709240345 | − |
| 302 | 1212 | 13077 | chr2 | 54278094 | 54284497 | ENSG00000170634 | ACYP2 | −0.708784218 | − |
| 303 | 1213 | 04820 | chr11 | 85733409 | 85742653 | ENSG00000073921 | PICALM | 0.707847663 | + |
| 304 | 1214 | 17594 | chr5 | 122881110 | 122893258 | ENSG00000151292 | CSNK1G3 | 0.70648759 | + |
| 305 | 1215 | 07062 | chr14 | 39746137 | 39748741 | ENSG00000258941 | RP11- | −0.705740708 | − |
| | | | | | | | 407N17.3 | | |
| 306 | 1216 | 16701 | chr4 | 154315413 | 154318485 | ENSG00000121211 | MND1 | −0.705435194 | − |
| 307 | 1217 | 08004 | chr15 | 50875285 | 50878685 | ENSG00000092439 | TRPM7 | −0.704828246 | − |
| 308 | 1218 | 16681 | chr4 | 153332454 | 153333681 | ENSG00000109670 | FBXW7 | 0.704685694 | + |
| 309 | 1219 | 17907 | chr5 | 162909647 | 162911251 | ENSG00000072571 | HMMR | −0.702946274 | − |
| 310 | 1220 | 05911 | chr12 | 69983264 | 69985939 | ENSG00000166226 | CCT2 | −0.702361818 | − |
| 311 | 1221 | 00169 | chr1 | 115005725 | 115007010 | ENSG00000197323 | TRIM33 | −0.700608549 | − |
| 312 | 1222 | 14223 | chr21 | 37734480 | 37736557 | ENSG00000159256 | MORC3 | −0.697854368 | − |
| 313 | 1223 | 22527 | chr9 | 4860124 | 4860901 | ENSG00000120158 | RCL1 | −0.695160044 | − |
| 314 | 1224 | 09138 | chr16 | 68300495 | 68300624 | ENSG00000103064 | SLC7A6 | 0.694891988 | + |
| 315 | 1225 | 18377 | chr5 | 68470703 | 68471364 | ENSG00000134057 | CCNB1 | −0.694429979 | − |
| 316 | 1226 | 18506 | chr5 | 75993811 | 75997038 | ENSG00000145703 | IQGAP2 | −0.693808924 | − |
| 317 | 1227 | 10787 | chr18 | 45391429 | 45423180 | ENSG00000175387 | SMAD2 | 0.691627662 | + |
| 318 | 1228 | 04075 | chr11 | 17167214 | 17167489 | ENSG00000011405 | PIK3C2A | −0.690859029 | − |
| 319 | 1229 | 19214 | chr6 | 17665469 | 17669777 | ENSG00000124789 | NUP153 | −0.690761984 | − |
| 320 | 1230 | 19533 | chr6 | 52935854 | 52941341 | ENSG00000112146 | FBXO9 | −0.688778917 | − |
| 321 | 1231 | 10179 | chr17 | 58346810 | 58348842 | ENSG00000170832 | USP32 | −0.688400663 | − |
| 322 | 1232 | 09309 | chr16 | 81058319 | 81060243 | ENSG00000166451 | CENPN | −0.683869042 | − |
| 323 | 1233 | 16985 | chr4 | 39739039 | 39776553 | ENSG00000078140 | UBE2K | 0.683584317 | + |
| 324 | 1234 | 06320 | chr13 | 28748408 | 28752072 | ENSG00000152520 | PAN3 | −0.683323431 | − |
| 325 | 1235 | 15439 | chr3 | 180651121 | 180653019 | ENSG00000114416 | FXR1 | −0.677850731 | − |
| 326 | 1236 | 18715 | chr6 | 10703637 | 10705077 | ENSG00000111845 | PAK1IP1 | −0.677107932 | − |
| 327 | 1237 | 20193 | chr7 | 141760110 | 141786128 | ENSG00000257335 | MGAM | −0.674929803 | − |
| 328 | 1238 | 02184 | chr1 | 67356836 | 67371058 | ENSG00000152763 | WDR78 | −0.674140838 | − |
| 329 | 1239 | 00394 | chr1 | 155646338 | 155649303 | ENSG00000163374 | YY1AP1 | −0.674066047 | − |
| 330 | 1240 | 21181 | chr8 | 141582910 | 141595410 | ENSG00000123908 | AGO2 | −0.6713091 | − |
| 331 | 1241 | 13696 | chr20 | 34317233 | 34320057 | ENSG00000131051 | RBM39 | −0.662798279 | − |
| 332 | 1242 | 17137 | chr4 | 54292038 | 54310270 | ENSG00000145216 | FIP1L1 | −0.662175886 | − |
| 333 | 1243 | 02329 | chr1 | 89206670 | 89237562 | ENSG00000065243 | PKN2 | −0.660194584 | − |
| 334 | 1244 | 08087 | chr15 | 56686362 | 56687032 | ENSG00000151575 | TEX9 | −0.657395416 | − |
| 335 | 1245 | 22808 | chrM | 678 | 946 | NA | NA | 0.656447182 | + |
| 336 | 1246 | 06741 | chr13 | 99890680 | 99896878 | ENSG00000134882 | UBAC2 | −0.655751379 | − |
| 337 | 1247 | 15306 | chr3 | 169694733 | 169706147 | ENSG00000008952 | SEC62 | −0.65538327 | − |
| 338 | 1248 | 21571 | chr8 | 61137095 | 61139494 | ENSG00000178538 | CA8 | −0.650767459 | − |
| 339 | 1249 | 13002 | chr2 | 44717924 | 44719593 | ENSG00000143919 | CAMKMT | −0.649894452 | − |
| 340 | 1250 | 02797 | chr10 | 13233298 | 13234568 | ENSG00000065328 | MCM10 | −0.649679006 | − |
| 341 | 1251 | 01565 | chr1 | 25666964 | 25683344 | ENSG00000183726 | TMEM50A | −0.649491962 | − |
| 342 | 1252 | 02928 | chr10 | 22880557 | 22898646 | ENSG00000150867 | PIP4K2A | −0.649420792 | − |
| 343 | 1253 | 03884 | chr11 | 120345268 | 120348235 | ENSG00000196914 | ARHGEF12 | −0.649153985 | − |
| 344 | 1254 | 04534 | chr11 | 66372959 | 66373063 | ENSG00000173992 | CCS | 0.647602152 | + |
| 345 | 1255 | 13232 | chr2 | 61749745 | 61761038 | ENSG00000082898 | XPO1 | −0.646529922 | − |
| 346 | 1256 | 05898 | chr12 | 69644908 | 69656342 | ENSG00000111605 | CPSF6 | 0.644341581 | + |
| 347 | 1257 | 14988 | chr3 | 138289159 | 138291774 | ENSG00000114107 | CEP70 | −0.643339219 | − |
| 348 | 1258 | 22417 | chr9 | 33996220 | 33998862 | ENSG00000137073 | UBAP2 | −0.642592519 | − |
| 349 | 1259 | 06760 | chr14 | 102659799 | 102661457 | ENSG00000140153 | WDR20 | −0.642496523 | − |
| 350 | 1260 | 02652 | chr10 | 11643343 | 11643979 | ENSG00000148429 | USP6NL | −0.642008103 | − |
| 351 | 1261 | 13125 | chr2 | 58449076 | 58459247 | ENSG00000115392 | FANCL | −0.641155337 | − |
| 352 | 1262 | 07060 | chr14 | 39648294 | 39648666 | ENSG00000100941 | PNN | −0.640545333 | − |
| 353 | 1263 | 18429 | chr5 | 72285253 | 72286691 | ENSG00000157107 | FCHO2 | −0.640018867 | − |
| 354 | 1264 | 07683 | chr14 | 99924615 | 99932150 | ENSG00000183576 | SETD3 | −0.639034091 | − |
| 355 | 1265 | 20868 | chr7 | 99621041 | 99621930 | ENSG00000106261 | ZKSCAN1 | −0.637712203 | − |
| 356 | 1266 | 02331 | chr1 | 89206670 | 89251896 | ENSG00000065243 | PKN2 | −0.635932753 | − |
| 357 | 1267 | 04405 | chr11 | 61133516 | 61135470 | ENSG00000149483 | TMEM138 | −0.634569229 | − |
| 358 | 1268 | 16983 | chr4 | 39739039 | 39747430 | ENSG00000078140 | UBE2K | −0.63344921 | − |
| 359 | 1269 | 16811 | chr4 | 170523158 | 170523829 | ENSG00000137601 | NEK1 | −0.632606144 | − |
| 360 | 1270 | 08802 | chr16 | 15973660 | 15978062 | ENSG00000133393 | FOPNL | −0.631706784 | − |
| 361 | 1271 | 05515 | chr12 | 28378727 | 28412375 | ENSG00000123106 | CCDC91 | −0.63053228 | − |
| 362 | 1272 | 00483 | chr1 | 15964801 | 15978390 | ENSG00000197312 | DDI2 | −0.630382539 | − |
| 363 | 1273 | 03851 | chr11 | 120276826 | 120278532 | ENSG00000196914 | ARHGEF12 | −0.62989944 | − |
| 364 | 1274 | 19220 | chr6 | 17669523 | 17675264 | ENSG00000124789 | NUP153 | −0.629886281 | − |
| 365 | 1275 | 16618 | chr4 | 144464661 | 144465125 | ENSG00000153147 | SMARCA5 | −0.628964515 | − |
| 366 | 1276 | 06199 | chr13 | 114265310 | 114277601 | ENSG00000198176 | TFDP1 | −0.626535807 | − |
| 367 | 1277 | 13881 | chr20 | 45874751 | 45875261 | ENSG00000101040 | ZMYND8 | −0.625387432 | − |
| 368 | 1278 | 15830 | chr3 | 32757716 | 32758729 | ENSG00000182973 | CNOT10 | −0.620191841 | − |
| 369 | 1279 | 01339 | chr1 | 226453233 | 226454033 | ENSG00000183814 | LIN9 | −0.619533975 | − |
| 370 | 1280 | 21917 | chr9 | 114840817 | 114842445 | ENSG00000106868 | SUSD1 | −0.618533169 | − |
| 371 | 1281 | 17404 | chr4 | 89827529 | 89859392 | ENSG00000138640 | FAM13A | −0.613111444 | − |
| 372 | 1282 | 10799 | chr18 | 47017995 | 47018203 | ENSG00000265681 | RPL17 | −0.61125224 | − |
| 373 | 1283 | 08584 | chr15 | 90431752 | 90432372 | ENSG00000157823 | AP3S2 | −0.608684683 | − |
| 374 | 1284 | 09579 | chr17 | 28003837 | 28004759 | ENSG00000141298 | SSH2 | 0.608248578 | + |
| 375 | 1285 | 01693 | chr1 | 29362337 | 29365938 | ENSG00000159023 | EPB41 | −0.607275382 | − |
| 376 | 1286 | 20192 | chr7 | 141759271 | 141784444 | ENSG00000257335 | MGAM | 0.604473759 | + |
| 377 | 1287 | 03072 | chr10 | 32832227 | 32873232 | ENSG00000216937 | CCDC7 | −0.601944609 | − |
| 378 | 1288 | 21122 | chr8 | 131226801 | 131249240 | ENSG00000153317 | ASAP1 | 0.596477189 | + |
| 379 | 1289 | 11808 | chr2 | 148730307 | 148739650 | ENSG00000115947 | ORC4 | −0.595902755 | − |
| 380 | 1290 | 18633 | chr5 | 93978977 | 93990457 | ENSG00000133302 | ANKRD32 | 0.595223761 | + |
| 381 | 1291 | 06793 | chr14 | 103918254 | 103923549 | ENSG00000075413 | MARK3 | −0.593329884 | − |
| 382 | 1292 | 02441 | chr1 | 95609446 | 95616975 | ENSG00000152078 | TMEM56 | −0.592118741 | − |
| 383 | 1293 | 00317 | chr1 | 151139409 | 151139890 | ENSG00000163156 | SCNM1 | −0.59143984 | − |
| 384 | 1294 | 05925 | chr12 | 70193988 | 70195501 | ENSG00000127328 | RAB3IP | −0.590453589 | − |
| 385 | 1295 | 09920 | chr17 | 45247282 | 45249430 | ENSG00000004897 | CDC27 | −0.590090956 | − |
| 386 | 1296 | 18485 | chr5 | 74842834 | 74848416 | ENSG00000122008 | POLK | −0.589212654 | − |
| 387 | 1297 | 06721 | chr13 | 95886863 | 95900007 | ENSG00000125257 | ABCC4 | 0.58894702 | + |
| 388 | 1298 | 00393 | chr1 | 155644800 | 155649303 | ENSG00000163374 | YY1AP1 | −0.588932673 | − |
| 389 | 1299 | 01882 | chr1 | 43293959 | 43295969 | ENSG00000164010 | ERMAP | −0.588844379 | − |
| 390 | 1300 | 03896 | chr11 | 120916382 | 120930794 | ENSG00000154114 | TBCEL | −0.586343839 | − |
| 391 | 1301 | 06549 | chr13 | 50025688 | 50026045 | ENSG00000136169 | SETDB2 | −0.585761927 | − |
| 392 | 1302 | 10785 | chr18 | 45391429 | 45396935 | ENSG00000175387 | SMAD2 | 0.583937093 | + |
| 393 | 1303 | 06941 | chr14 | 31424825 | 31425448 | ENSG00000196792 | STRN3 | −0.583201151 | − |
| 394 | 1304 | 06310 | chr13 | 26974589 | 26975761 | ENSG00000132964 | CDK8 | −0.581890878 | − |
| 395 | 1305 | 09968 | chr17 | 47388673 | 47389404 | ENSG00000198740 | ZNF652 | −0.581062739 | − |
| 396 | 1306 | 16163 | chr3 | 56626997 | 56628056 | ENSG00000180376 | CCDC66 | −0.578668491 | − |
| 397 | 1307 | 07694 | chr15 | 101104896 | 101105470 | ENSG00000140471 | LINS | −0.578351997 | − |
| 398 | 1308 | 02708 | chr10 | 121275020 | 121286936 | ENSG00000148908 | RGS10 | 0.577572918 | + |
| 399 | 1309 | 05496 | chr12 | 27107077 | 27110676 | ENSG00000111790 | FGFR1OP2 | 0.576980459 | + |
| 400 | 1310 | 14614 | chr22 | 41568502 | 41569788 | ENSG00000100393 | EP300 | −0.576686603 | − |
| 401 | 1311 | 12064 | chr2 | 175976295 | 175986268 | ENSG00000115966 | ATF2 | −0.575720234 | − |
| 402 | 1312 | 03039 | chr10 | 32309949 | 32310215 | ENSG00000170759 | KIF5B | −0.575295577 | − |
| 403 | 1313 | 07693 | chr15 | 101104892 | 101105470 | ENSG00000140471 | LINS | −0.574250823 | − |
| 404 | 1314 | 10271 | chr17 | 60111147 | 60112969 | ENSG00000108510 | MED13 | −0.574056275 | − |
| 405 | 1315 | 10970 | chr18 | 77668145 | 77668309 | ENSG00000122490 | PQLC1 | −0.571239552 | − |
| 406 | 1316 | 04710 | chr11 | 77394754 | 77404656 | ENSG00000048649 | RSF1 | 0.571177955 | + |
| 407 | 1317 | 23217 | chrX | 76907603 | 76912143 | ENSG00000085224 | ATRX | −0.569592962 | − |
| 408 | 1318 | 12082 | chr2 | 178096616 | 178098999 | ENSG00000116044 | NFE2L2 | −0.56851133 | − |
| 409 | 1319 | 00788 | chr1 | 179972308 | 179975702 | ENSG00000135837 | CEP350 | −0.568320418 | − |
| 410 | 1320 | 05414 | chr12 | 14609494 | 14610229 | ENSG00000171681 | ATF7IP | −0.567149617 | − |
| 411 | 1321 | 20442 | chr7 | 27668989 | 27672064 | ENSG00000106049 | HIBADH | −0.566428216 | − |
| 412 | 1322 | 21415 | chr8 | 37967896 | 37968351 | ENSG00000129691 | ASH2L | −0.565206772 | − |
| 413 | 1323 | 16141 | chr3 | 52771601 | 52775515 | ENSG00000114904 | NEK4 | −0.56479756 | − |
| 414 | 1324 | 15039 | chr3 | 141811902 | 141820683 | ENSG00000114126 | TFDP2 | −0.563649191 | − |
| 415 | 1325 | 01723 | chr1 | 29481207 | 29481422 | ENSG00000116350 | SRSF4 | −0.56351081 | − |
| 416 | 1326 | 12722 | chr2 | 24787163 | 24816590 | ENSG00000084676 | NCOA1 | −0.562536917 | − |
| 417 | 1327 | 01585 | chr1 | 26594973 | 26596105 | ENSG00000130695 | CEP85 | −0.556978262 | − |
| 418 | 1328 | 04814 | chr11 | 85723323 | 85742653 | ENSG00000073921 | PICALM | 0.555693534 | + |
| 419 | 1329 | 06795 | chr14 | 103918254 | 103928798 | ENSG00000075413 | MARK3 | −0.555161705 | − |
| 420 | 1330 | 18206 | chr5 | 52899281 | 52900725 | ENSG00000164258 | NDUFS4 | −0.55332775 | − |
| 421 | 1331 | 08277 | chr15 | 65471271 | 65472542 | ENSG00000166855 | CLPX | −0.553060093 | − |
| 422 | 1332 | 15888 | chr3 | 37170553 | 37196215 | ENSG00000093167 | LRRFIP2 | −0.552719212 | − |
| 423 | 1333 | 14215 | chr21 | 37716876 | 37721706 | ENSG00000159256 | MORC3 | 0.552495821 | + |
| 424 | 1334 | 21103 | chr8 | 131164981 | 131193126 | ENSG00000153317 | ASAP1 | −0.552048479 | − |
| 425 | 1335 | 03209 | chr10 | 5838725 | 5842668 | ENSG00000057608 | GDI2 | −0.550992097 | − |
| 426 | 1336 | 20435 | chr7 | 26724354 | 26729981 | ENSG00000005020 | SKAP2 | −0.550537566 | − |
| 427 | 1337 | 18379 | chr5 | 68487621 | 68492936 | ENSG00000153044 | CENPH | −0.549245895 | − |
| 428 | 1338 | 07964 | chr15 | 49528047 | 49531564 | ENSG00000156958 | GALK2 | −0.548755689 | − |
| 429 | 1339 | 09370 | chr16 | 9009110 | 9011013 | ENSG00000187555 | USP7 | −0.548099255 | − |
| 430 | 1340 | 20041 | chr7 | 129760588 | 129762042 | ENSG00000128607 | KLHDC10 | −0.547563163 | − |
| 431 | 1341 | 11772 | chr2 | 136432901 | 136437894 | ENSG00000048991 | R3HDM1 | −0.547466106 | − |
| 432 | 1342 | 12227 | chr2 | 201721404 | 201721708 | ENSG00000013441 | CLK1 | −0.546383174 | − |
| 433 | 1343 | 21187 | chr8 | 141595217 | 141595410 | ENSG00000123908 | AGO2 | −0.54617497 | − |
| 434 | 1344 | 06474 | chr13 | 43528083 | 43544806 | ENSG00000133106 | EPSTI1 | 0.546089365 | + |
| 435 | 1345 | 07887 | chr15 | 43627142 | 43628024 | ENSG00000168803 | ADAL | −0.545213157 | − |
| 436 | 1346 | 04380 | chr11 | 5248159 | 5255443 | ENSG00000244734 | HBB | −0.544981515 | − |
| 437 | 1347 | 20067 | chr7 | 131071878 | 131073731 | ENSG00000128585 | MKLN1 | −0.544816911 | − |
| 438 | 1348 | 01978 | chr1 | 51868106 | 51874004 | ENSG00000085832 | EPS15 | −0.54474945 | − |
| 439 | 1349 | 05796 | chr12 | 62715244 | 62749256 | ENSG00000135655 | USP15 | −0.542734982 | − |
| 440 | 1350 | 06458 | chr13 | 41943225 | 41946966 | ENSG00000172766 | NAA16 | −0.542699921 | − |
| 441 | 1351 | 12631 | chr2 | 24046127 | 24046439 | ENSG00000119778 | ATAD2B | −0.542019024 | − |
| 442 | 1352 | 16247 | chr3 | 69077050 | 69077446 | ENSG00000144747 | TMF1 | −0.541249355 | − |
| 443 | 1353 | 16972 | chr4 | 39328182 | 39329376 | ENSG00000035928 | RFC1 | 0.539983221 | + |
| 444 | 1354 | 12660 | chr2 | 24103508 | 24108699 | ENSG00000119778 | ATAD2B | 0.537763436 | + |
| 445 | 1355 | 03207 | chr10 | 5836847 | 5842668 | ENSG00000057608 | GDI2 | 0.536487079 | + |
| 446 | 1356 | 14164 | chr21 | 34804483 | 34805178 | ENSG00000159128 | IFNGR2 | −0.535037721 | − |
| 447 | 1357 | 03806 | chr11 | 117150623 | 117150975 | ENSG00000167257 | RNF214 | −0.533600834 | − |
| 448 | 1358 | 18891 | chr6 | 131481198 | 131490413 | ENSG00000118507 | AKAP7 | −0.530137447 | − |
| 449 | 1359 | 10683 | chr18 | 29412046 | 29419420 | ENSG00000153339 | TRAPPC8 | −0.52543663 | − |
| 450 | 1360 | 12223 | chr2 | 201718625 | 201719809 | ENSG00000013441 | CLK1 | −0.522633343 | − |
| 451 | 1361 | 22413 | chr9 | 33986757 | 33998862 | ENSG00000137073 | UBAP2 | 0.521045501 | + |
| 452 | 1362 | 17718 | chr5 | 137320945 | 137324004 | ENSG00000031003 | FAM13B | −0.520881586 | − |
| 453 | 1363 | 18147 | chr5 | 38971978 | 38978752 | ENSG00000164327 | RICTOR | −0.520750421 | − |
| 454 | 1364 | 01647 | chr1 | 29313942 | 29314417 | ENSG00000159023 | EPB41 | −0.52004965 | − |
| 455 | 1365 | 18058 | chr5 | 179665331 | 179668155 | ENSG00000050748 | MAPK9 | −0.519526036 | − |
| 456 | 1366 | 16094 | chr3 | 50145502 | 50145737 | ENSG00000003756 | RBM5 | −0.518700066 | − |
| 457 | 1367 | 03636 | chr10 | 98312403 | 98312816 | ENSG00000077147 | TM9SF3 | −0.518334594 | − |
| 458 | 1368 | 07659 | chr14 | 97026985 | 97029230 | ENSG00000090060 | PAPOLA | −0.516218178 | − |
| 459 | 1369 | 01488 | chr1 | 24112164 | 24112913 | ENSG00000057757 | PITHD1 | −0.515901988 | − |
| 460 | 1370 | 18726 | chr6 | 108243000 | 108250718 | ENSG00000025796 | SEC63 | −0.512704372 | − |
| 461 | 1371 | 21934 | chr9 | 115013208 | 115015068 | ENSG00000119314 | PTBP3 | 0.511483471 | + |
| 462 | 1372 | 11181 | chr19 | 19603114 | 19603521 | ENSG00000167491 | GATAD2A | −0.506490329 | − |
| 463 | 1373 | 17532 | chr5 | 112128142 | 112128674 | ENSG00000134982 | APC | −0.505576237 | − |
| 464 | 1374 | 00404 | chr1 | 155823066 | 155823597 | ENSG00000116580 | GON4L | −0.504015347 | − |
| 465 | 1375 | 16639 | chr4 | 147227077 | 147230127 | ENSG00000120519 | SLC10A7 | −0.501165826 | − |
| 466 | 1376 | 11038 | chr19 | 10273342 | 10277361 | ENSG00000130816 | DNMT1 | −0.499037453 | − |
| 467 | 1377 | 12628 | chr2 | 24042616 | 24046439 | ENSG00000119778 | ATAD2B | −0.49858657 | − |
| 468 | 1378 | 20317 | chr7 | 158580694 | 158591763 | ENSG00000117868 | ESYT2 | −0.497702626 | − |
| 469 | 1379 | 07790 | chr15 | 40938035 | 40939272 | ENSG00000137812 | CASC5 | −0.497560503 | − |
| 470 | 1380 | 03959 | chr11 | 130130750 | 130131824 | ENSG00000196323 | ZBTB44 | −0.497284677 | − |
| 471 | 1381 | 08659 | chr15 | 93543741 | 93552553 | ENSG00000173575 | CHD2 | −0.497214572 | − |
| 472 | 1382 | 21499 | chr8 | 48308935 | 48320523 | ENSG00000164808 | SPIDR | 0.497091896 | + |
| 473 | 1383 | 14410 | chr22 | 29120964 | 29121355 | ENSG00000183765 | CHEK2 | −0.496970217 | − |
| 474 | 1384 | 05272 | chr12 | 122995655 | 122999774 | ENSG00000111011 | RSRC2 | −0.496602757 | − |
| 475 | 1385 | 20253 | chr7 | 152007050 | 152012423 | ENSG00000055609 | KMT2C | 0.49641096 | + |
| 476 | 1386 | 12867 | chr2 | 33442618 | 33447218 | ENSG00000049323 | LTBP1 | −0.494203398 | − |
| 477 | 1387 | 18343 | chr5 | 65307876 | 65310553 | ENSG00000112851 | ERBB2IP | −0.490100764 | − |
| 478 | 1388 | 16491 | chr4 | 128995614 | 128999117 | ENSG00000138709 | LARP1B | −0.489563987 | − |
| 479 | 1389 | 23279 | chrY | 22749909 | 22751461 | ENSG00000198692 | EIF1AY | −0.488676777 | − |
| 480 | 1390 | 04762 | chr11 | 85692171 | 85692271 | ENSG00000073921 | PICALM | 0.488490499 | + |
| 481 | 1391 | 03534 | chr10 | 93711159 | 93713630 | ENSG00000095564 | BTAF1 | −0.486905705 | − |
| 482 | 1392 | 12274 | chr2 | 202163467 | 202164023 | ENSG00000155749 | ALS2CR12 | −0.486743671 | − |
| 483 | 1393 | 17490 | chr5 | 109049220 | 109065214 | ENSG00000112893 | MAN2A1 | −0.486367479 | − |
| 484 | 1394 | 07235 | chr14 | 53003436 | 53011089 | ENSG00000087301 | TXNDC16 | −0.485655501 | − |
| 485 | 1395 | 00199 | chr1 | 117944807 | 117963271 | ENSG00000198162 | MAN1A2 | −0.484302881 | − |
| 486 | 1396 | 01097 | chr1 | 207896962 | 207898053 | ENSG00000197721 | CR1L | −0.48202167 | − |
| 487 | 1397 | 08154 | chr15 | 62299506 | 62306191 | ENSG00000129003 | VPS13C | −0.480880375 | − |
| 488 | 1398 | 01423 | chr1 | 23356961 | 23377013 | ENSG00000004487 | KDM1A | −0.48077223 | − |
| 489 | 1399 | 18273 | chr5 | 56542126 | 56543042 | ENSG00000062194 | GPBP1 | −0.480747801 | − |
| 490 | 1400 | 02982 | chr10 | 27821435 | 27822923 | ENSG00000099246 | RAB18 | −0.479223363 | − |
| 491 | 1401 | 09356 | chr16 | 89824984 | 89828430 | ENSG00000187741 | FANCA | −0.477120997 | − |
| 492 | 1402 | 02496 | chr10 | 103221737 | 103239214 | ENSG00000166167 | BTRC | −0.473303249 | − |
| 493 | 1403 | 02437 | chr1 | 95603830 | 95616975 | ENSG00000231992 | RP11- | −0.471456403 | − |
| | | | | | | | 57H12.2 | | |
| 494 | 1404 | 14948 | chr3 | 136323150 | 136323315 | ENSG00000118007 | STAG1 | −0.470361517 | − |
| 495 | 1405 | 16191 | chr3 | 57618991 | 57627474 | ENSG00000174839 | DENND6A | 0.469381446 | + |
| 496 | 1406 | 00019 | chr1 | 100889777 | 100908552 | ENSG00000079335 | CDC14A | −0.467831947 | − |
| 497 | 1407 | 17405 | chr4 | 89827529 | 89870589 | ENSG00000138640 | FAM13A | −0.467278089 | − |
| 498 | 1408 | 05428 | chr12 | 1812051 | 1863680 | ENSG00000006831 | ADIPOR2 | −0.467232674 | − |
| 499 | 1409 | 15760 | chr3 | 20178433 | 20181856 | ENSG00000114166 | KAT2B | −0.466896651 | − |
| 500 | 1410 | 09205 | chr16 | 70601313 | 70601439 | ENSG00000189091 | SF3B3 | −0.464994622 | − |
| 501 | 1411 | 14782 | chr3 | 119219541 | 119222868 | ENSG00000113845 | TIMMDC1 | 0.463424571 | + |
| 502 | 1412 | 17376 | chr4 | 88116475 | 88116842 | ENSG00000145332 | KLHL8 | −0.462383046 | − |
| 503 | 1413 | 22074 | chr9 | 127670655 | 127674305 | ENSG00000136935 | GOLGA1 | −0.462041586 | − |
| 504 | 1414 | 09111 | chr16 | 67662272 | 67663436 | ENSG00000102974 | CTCF | −0.461139143 | − |
| 505 | 1415 | 12648 | chr2 | 240929490 | 240946787 | ENSG00000130414 | NDUFA10 | −0.459774784 | − |
| 506 | 1416 | 11683 | chr2 | 122514815 | 122519100 | ENSG00000211460 | TSN | −0.458085496 | − |
| 507 | 1417 | 04141 | chr11 | 33307958 | 33309057 | ENSG00000110422 | HIPK3 | −0.457031488 | − |
| 508 | 1418 | 02328 | chr1 | 89206670 | 89226059 | ENSG00000065243 | PKN2 | −0.456886353 | − |
| 509 | 1419 | 17863 | chr5 | 153413350 | 153414527 | ENSG00000055147 | FAM114A2 | −0.456304188 | − |
| 510 | 1420 | 16668 | chr4 | 151719232 | 151738409 | ENSG00000198589 | LRBA | −0.456090855 | − |
| 511 | 1421 | 23105 | chrX | 44941820 | 44942034 | ENSG00000147050 | KDM6A | 0.456030497 | + |
| 512 | 1422 | 01954 | chr1 | 47834140 | 47840965 | ENSG00000162368 | CMPK1 | 0.455682466 | + |
| 513 | 1423 | 08564 | chr15 | 89656955 | 89659752 | ENSG00000140526 | ABHD2 | −0.454247399 | − |
| 514 | 1424 | 20352 | chr7 | 17929985 | 17937069 | ENSG00000071189 | SNX13 | −0.449868927 | − |
| 515 | 1425 | 11008 | chr18 | 9524591 | 9525849 | ENSG00000017797 | RALBP1 | 0.447213595 | + |
| 516 | 1426 | 22402 | chr9 | 33960823 | 33989124 | ENSG00000137073 | UBAP2 | 0.447213595 | + |
| 517 | 1427 | 21830 | chr9 | 100756912 | 100760960 | ENSG00000136938 | ANP32B | −0.447213595 | − |
| 518 | 1428 | 12329 | chr2 | 203162101 | 203162629 | ENSG00000055044 | NOP58 | −0.447213595 | − |
| 519 | 1429 | 15468 | chr3 | 182679013 | 182683541 | ENSG00000043093 | DCUN1D1 | −0.447213595 | − |
| 520 | 1430 | 04828 | chr11 | 85961337 | 85963282 | ENSG00000074266 | EED | −0.447213595 | − |
| 521 | 1431 | 16490 | chr4 | 128995614 | 128996148 | ENSG00000138709 | LARP1B | −0.444473314 | − |
| 522 | 1432 | 01030 | chr1 | 200583445 | 200584737 | ENSG00000118193 | KIF14 | −0.443117581 | − |
| 523 | 1433 | 19420 | chr6 | 42559888 | 42562042 | ENSG00000024048 | UBR2 | −0.439246455 | − |
| 524 | 1434 | 14185 | chr21 | 37619814 | 37620866 | ENSG00000142197 | DOPEY2 | −0.438906244 | − |
| 525 | 1435 | 03718 | chr11 | 108046972 | 108047817 | ENSG00000149308 | NPAT | −0.435269889 | − |
| 526 | 1436 | 09613 | chr17 | 29170930 | 29171934 | ENSG00000176208 | ATAD5 | −0.434866756 | − |
| 527 | 1437 | 06750 | chr14 | 102368055 | 102372866 | ENSG00000078304 | PPP2R5C | 0.434853393 | + |
| 528 | 1438 | 01018 | chr1 | 200550328 | 200561368 | ENSG00000118193 | KIF14 | −0.434615126 | − |
| 529 | 1439 | 16470 | chr4 | 123977541 | 123978443 | ENSG00000145375 | SPATA5 | −0.434279453 | − |
| 530 | 1440 | 09778 | chr17 | 38547757 | 38548989 | ENSG00000131747 | TOP2A | −0.434135915 | − |
| 531 | 1441 | 05143 | chr12 | 11273608 | 11276786 | ENSG00000111215 | PRR4 | −0.433592133 | − |
| 532 | 1442 | 06260 | chr13 | 21729831 | 21732264 | ENSG00000165480 | SKA3 | −0.432989827 | − |
| 533 | 1443 | 22228 | chr9 | 139115852 | 139118720 | ENSG00000165661 | QSOX2 | −0.432509181 | − |
| 534 | 1444 | 13448 | chr2 | 9048750 | 9098771 | ENSG00000143797 | MBOAT2 | −0.432354985 | − |
| 535 | 1445 | 15357 | chr3 | 171965322 | 171969331 | ENSG00000075420 | FNDC3B | 0.43092904 | + |
| 536 | 1446 | 09002 | chr16 | 47581343 | 47581459 | ENSG00000102893 | PHKB | −0.427842792 | − |
| 537 | 1447 | 06393 | chr13 | 33091993 | 33101669 | ENSG00000244754 | N4BP2L2 | −0.427642991 | − |
| 538 | 1448 | 13458 | chr2 | 9083315 | 9102747 | ENSG00000143797 | MBOAT2 | −0.427573656 | − |
| 539 | 1449 | 16825 | chr4 | 17816475 | 17816981 | ENSG00000109805 | NCAPG | −0.426826527 | − |
| 540 | 1450 | 23126 | chrX | 53430497 | 53430825 | ENSG00000072501 | SMC1A | −0.424399643 | − |
| 541 | 1451 | 20269 | chr7 | 155465560 | 155473602 | ENSG00000184863 | RBM33 | 0.424359885 | + |
| 542 | 1452 | 09112 | chr16 | 67663300 | 67663436 | ENSG00000102974 | CTCF | −0.423521981 | − |
| 543 | 1453 | 06268 | chr13 | 21742126 | 21742538 | ENSG00000165480 | SKA3 | −0.421756846 | − |
| 544 | 1454 | 16155 | chr3 | 56600621 | 56601081 | ENSG00000180376 | CCDC66 | −0.420550846 | − |
| 545 | 1455 | 17913 | chr5 | 167915606 | 167921655 | ENSG00000113643 | RARS | −0.42049953 | − |
| 546 | 1456 | 04638 | chr11 | 73843888 | 73844602 | ENSG00000168014 | C2CD3 | −0.418953178 | − |
| 547 | 1457 | 02840 | chr10 | 15858833 | 15889942 | ENSG00000148481 | FAM188A | 0.418323531 | + |
| 548 | 1458 | 07667 | chr14 | 97299803 | 97327072 | ENSG00000100749 | VRK1 | −0.417060256 | − |
| 549 | 1459 | 02854 | chr10 | 16773475 | 16776063 | ENSG00000148484 | RSU1 | −0.413151582 | − |
| 550 | 1460 | 19975 | chr7 | 111027029 | 111030750 | ENSG00000184903 | IMMP2L | −0.412214025 | − |
| 551 | 1461 | 03181 | chr10 | 52279590 | 52350007 | ENSG00000198964 | SGMS1 | −0.411306293 | − |
| 552 | 1462 | 15801 | chr3 | 31617887 | 31621588 | ENSG00000163527 | STT3B | 0.410299463 | + |
| 553 | 1463 | 20062 | chr7 | 131060182 | 131073731 | ENSG00000128585 | MKLN1 | −0.407576284 | − |
| 554 | 1464 | 09831 | chr17 | 40879652 | 40882936 | ENSG00000108799 | EZH1 | −0.407486821 | − |
| 555 | 1465 | 03697 | chr11 | 107260799 | 107263621 | ENSG00000152404 | CWF19L2 | −0.405295156 | − |
| 556 | 1466 | 15598 | chr3 | 195785154 | 195787118 | ENSG00000072274 | TFRC | −0.403678077 | − |
| 557 | 1467 | 06663 | chr13 | 79209244 | 79219132 | ENSG00000152193 | RNF219 | −0.402902809 | − |
| 558 | 1468 | 22473 | chr9 | 3647337 | 3651867 | ENSG00000237359 | RP11- | −0.401011186 | − |
| | | | | | | | 509J21.2 | | |
| 559 | 1469 | 15073 | chr3 | 142144063 | 142145683 | ENSG00000114127 | XRN1 | −0.400992543 | − |
| 560 | 1470 | 00198 | chr1 | 117944807 | 117957453 | ENSG00000198162 | MAN1A2 | −0.399491844 | − |
| 561 | 1471 | 13616 | chr20 | 30954186 | 30956926 | ENSG00000171456 | ASXL1 | 0.396909813 | + |
| 562 | 1472 | 00912 | chr1 | 187272597 | 187298192 | ENSG00000236030 | LINC01036 | 0.395630665 | + |
| 563 | 1473 | 17336 | chr4 | 83891479 | 83900159 | ENSG00000189308 | LIN54 | 0.395430875 | + |
| 564 | 1474 | 09814 | chr17 | 40650941 | 40653322 | ENSG00000033627 | ATP6V0A1 | −0.394907679 | − |
| 565 | 1475 | 21876 | chr9 | 110062421 | 110074018 | ENSG00000119318 | RAD23B | −0.393198961 | − |
| 566 | 1476 | 21373 | chr8 | 29959413 | 29962002 | ENSG00000104660 | LEPROTL1 | −0.392842587 | − |
| 567 | 1477 | 19233 | chr6 | 18236682 | 18258636 | ENSG00000124795 | DEK | −0.3917531 | − |
| 568 | 1478 | 11803 | chr2 | 148653869 | 148657467 | ENSG00000121989 | ACVR2A | 0.391156997 | + |
| 569 | 1479 | 03038 | chr10 | 32308785 | 32310215 | ENSG00000170759 | KIF5B | −0.390203461 | − |
| 570 | 1480 | 22414 | chr9 | 33986757 | 34017187 | ENSG00000137073 | UBAP2 | 0.384924931 | + |
| 571 | 1481 | 00555 | chr1 | 167921037 | 167944253 | ENSG00000143164 | DCAF6 | 0.384256353 | + |
| 572 | 1482 | 12529 | chr2 | 227729319 | 227779067 | ENSG00000144468 | RHBDD1 | −0.384024802 | − |
| 573 | 1483 | 08578 | chr15 | 89856134 | 89857938 | ENSG00000140525 | FANCI | −0.383669546 | − |
| 574 | 1484 | 05946 | chr12 | 72051305 | 72054207 | ENSG00000133858 | ZFC3H1 | −0.378677648 | − |
| 575 | 1485 | 10124 | chr17 | 57430575 | 57430887 | ENSG00000175155 | YPEL2 | −0.374464606 | − |
| 576 | 1486 | 18352 | chr5 | 65349233 | 65350779 | ENSG00000112851 | ERBB2IP | −0.368836498 | − |
| 577 | 1487 | 18457 | chr5 | 72354259 | 72373320 | ENSG00000157107 | FCHO2 | 0.36829492 | + |
| 578 | 1488 | 12608 | chr2 | 239090705 | 239093928 | ENSG00000132323 | ILKAP | −0.36754271 | − |
| 579 | 1489 | 20565 | chr7 | 50358643 | 50367353 | ENSG00000185811 | IKZF1 | −0.367385234 | − |
| 580 | 1490 | 18886 | chr6 | 131466424 | 131490413 | ENSG00000118507 | AKAP7 | 0.365789382 | + |
| 581 | 1491 | 06726 | chr13 | 96409897 | 96416207 | ENSG00000102580 | DNAJC3 | 0.365346639 | + |
| 582 | 1492 | 11894 | chr2 | 15691616 | 15698758 | ENSG00000151779 | NBAS | −0.363763869 | − |
| 583 | 1493 | 08083 | chr15 | 56680669 | 56687032 | ENSG00000151575 | TEX9 | −0.363417974 | − |
| 584 | 1494 | 01398 | chr1 | 230798886 | 230800333 | ENSG00000135775 | COG2 | −0.362987252 | − |
| 585 | 1495 | 00433 | chr1 | 15860731 | 15863309 | ENSG00000116138 | DNAJC16 | −0.362155352 | − |
| 586 | 1496 | 15074 | chr3 | 142151502 | 142151735 | ENSG00000114127 | XRN1 | 0.361833765 | + |
| 587 | 1497 | 16004 | chr3 | 47139444 | 47147610 | ENSG00000181555 | SETD2 | 0.361080779 | + |
| 588 | 1498 | 18658 | chr5 | 95091099 | 95099324 | ENSG00000164292 | RHOBTB3 | −0.360131826 | − |
| 589 | 1499 | 14519 | chr22 | 38895404 | 38897285 | ENSG00000100201 | DDX17 | −0.358942195 | − |
| 590 | 1500 | 13180 | chr2 | 61505299 | 61508377 | ENSG00000115464 | USP34 | −0.357526515 | − |
| 591 | 1501 | 00915 | chr1 | 187296052 | 187298192 | ENSG00000236030 | LINC01036 | −0.357165013 | − |
| 592 | 1502 | 10135 | chr17 | 57808781 | 57816308 | ENSG00000062716 | VMP1 | 0.357082198 | + |
| 593 | 1503 | 11374 | chr19 | 48744218 | 48744320 | ENSG00000105483 | CARD8 | −0.356101853 | − |
| 594 | 1504 | 18196 | chr5 | 43675612 | 43677908 | ENSG00000112992 | NNT | −0.354388888 | − |
| 595 | 1505 | 12283 | chr2 | 202195192 | 202195556 | ENSG00000155749 | ALS2CR12 | −0.352185007 | − |
| 596 | 1506 | 01405 | chr1 | 231090078 | 231097049 | ENSG00000143643 | TTC13 | −0.348760252 | − |
| 597 | 1507 | 03492 | chr10 | 89268092 | 89280926 | ENSG00000107789 | MINPP1 | 0.348651579 | + |
| 598 | 1508 | 03880 | chr11 | 120335945 | 120338017 | ENSG00000196914 | ARHGEF12 | −0.348069091 | − |
| 599 | 1509 | 15092 | chr3 | 143704384 | 143708679 | ENSG00000181744 | C3orf58 | −0.342079566 | − |
| 600 | 1510 | 14257 | chr21 | 40578033 | 40584633 | ENSG00000185658 | BRWD1 | 0.3413697 | + |
| 601 | 1511 | 01241 | chr1 | 220179447 | 220180680 | ENSG00000136628 | EPRS | −0.341221548 | − |
| 602 | 1512 | 20408 | chr7 | 24663284 | 24690331 | ENSG00000105926 | MPP6 | −0.340271383 | − |
| 603 | 1513 | 18316 | chr5 | 64824278 | 64847463 | ENSG00000123219 | CENPK | 0.339380192 | + |
| 604 | 1514 | 20268 | chr7 | 155465560 | 155465982 | ENSG00000184863 | RBM33 | −0.336928551 | − |
| 605 | 1515 | 02266 | chr1 | 78177431 | 78181553 | ENSG00000077254 | USP33 | 0.334726691 | + |
| 606 | 1516 | 05793 | chr12 | 62708570 | 62749256 | ENSG00000135655 | USP15 | −0.333244067 | − |
| 607 | 1517 | 05179 | chr12 | 116668337 | 116675510 | ENSG00000123066 | MED13L | 0.333078903 | + |
| 608 | 1518 | 05174 | chr12 | 116668237 | 116675510 | ENSG00000123066 | MED13L | −0.332850418 | − |
| 609 | 1519 | 22708 | chr9 | 88284399 | 88327481 | ENSG00000135049 | AGTPBP1 | 0.332274421 | + |
| 610 | 1520 | 20391 | chr7 | 23650789 | 23651172 | ENSG00000169193 | CCDC126 | 0.329914132 | + |
| 611 | 1521 | 11362 | chr19 | 47767859 | 47768203 | ENSG00000105321 | CCDC9 | −0.327502934 | − |
| 612 | 1522 | 15121 | chr3 | 148303908 | 148310052 | NA | NA | −0.326264404 | − |
| 613 | 1523 | 02629 | chr10 | 11523768 | 11527910 | ENSG00000148429 | USP6NL | −0.32531565 | − |
| 614 | 1524 | 15583 | chr3 | 195101737 | 195112876 | ENSG00000114331 | ACAP2 | −0.323229025 | − |
| 615 | 1525 | 07647 | chr14 | 96986391 | 96991728 | ENSG00000090060 | PAPOLA | −0.322155377 | − |
| 616 | 1526 | 12697 | chr2 | 24357988 | 24369956 | ENSG00000219626 | FAM228B | −0.322096001 | − |
| 617 | 1527 | 09124 | chr16 | 68155889 | 68157024 | ENSG00000072736 | NFATC3 | −0.319198223 | − |
| 618 | 1528 | 01967 | chr1 | 51204534 | 51210447 | ENSG00000185104 | FAF1 | −0.318899562 | − |
| 619 | 1529 | 09438 | chr17 | 18768781 | 18769265 | ENSG00000141127 | PRPSAP2 | −0.316240039 | − |
| 620 | 1530 | 06838 | chr14 | 20811305 | 20811436 | ENSG00000259001 | RPPH1 | −0.314587253 | − |
| 621 | 1531 | 01695 | chr1 | 29362337 | 29391670 | ENSG00000159023 | EPB41 | −0.314217162 | − |
| 622 | 1532 | 06864 | chr14 | 23375403 | 23380612 | ENSG00000100461 | RBM23 | −0.314204415 | − |
| 623 | 1533 | 00645 | chr1 | 172520651 | 172526934 | ENSG00000094975 | SUCO | 0.312814513 | + |
| 624 | 1534 | 02169 | chr1 | 65830317 | 65831879 | ENSG00000116675 | DNAJC6 | −0.312716499 | − |
| 625 | 1535 | 01429 | chr1 | 23397717 | 23398690 | ENSG00000004487 | KDM1A | −0.312036199 | − |
| 626 | 1536 | 22699 | chr9 | 88257741 | 88261333 | ENSG00000135049 | AGTPBP1 | −0.309641223 | − |
| 627 | 1537 | 05351 | chr12 | 124071293 | 124074996 | ENSG00000086598 | TMED2 | 0.308784196 | + |
| 628 | 1538 | 18039 | chr5 | 179050037 | 179050165 | ENSG00000169045 | HNRNPH1 | −0.30753603 | − |
| 629 | 1539 | 13457 | chr2 | 9083315 | 9098771 | ENSG00000143797 | MBOAT2 | −0.307407548 | − |
| 630 | 1540 | 07460 | chr14 | 73614502 | 73614802 | ENSG00000080815 | PSEN1 | 0.307005543 | + |
| 631 | 1541 | 06725 | chr13 | 96375495 | 96377506 | ENSG00000102580 | DNAJC3 | −0.306943155 | − |
| 632 | 1542 | 20409 | chr7 | 24663284 | 24708279 | ENSG00000105926 | MPP6 | 0.304556407 | + |
| 633 | 1543 | 16349 | chr4 | 103635594 | 103647840 | ENSG00000109323 | MANBA | 0.302316399 | + |
| 634 | 1544 | 12976 | chr2 | 44436348 | 44436466 | ENSG00000138032 | PPM1B | −0.302057933 | − |
| 635 | 1545 | 05296 | chr12 | 123064451 | 123065217 | ENSG00000184445 | KNTC1 | −0.30064316 | − |
| 636 | 1546 | 13459 | chr2 | 9083315 | 9114564 | ENSG00000143797 | MBOAT2 | −0.300355128 | − |
| 637 | 1547 | 06911 | chr14 | 31185129 | 31204064 | ENSG00000092108 | SCFD1 | −0.300074829 | − |
| 638 | 1548 | 02265 | chr1 | 78177431 | 78180468 | ENSG00000077254 | USP33 | −0.299632707 | − |
| 639 | 1549 | 12279 | chr2 | 202172241 | 202173973 | ENSG00000155749 | ALS2CR12 | −0.298172541 | − |
| 640 | 1550 | 00882 | chr1 | 185183638 | 185200840 | ENSG00000116668 | SWT1 | −0.296383051 | − |
| 641 | 1551 | 21702 | chr8 | 86253827 | 86254037 | ENSG00000133742 | CA1 | −0.29494585 | − |
| 642 | 1552 | 06790 | chr14 | 103915255 | 103923549 | ENSG00000075413 | MARK3 | 0.293796256 | + |
| 643 | 1553 | 06499 | chr13 | 46577273 | 46594692 | ENSG00000123200 | ZC3H13 | −0.293181418 | − |
| 644 | 1554 | 19179 | chr6 | 163876310 | 163899928 | ENSG00000112531 | QKI | −0.293026578 | − |
| 645 | 1555 | 15650 | chr3 | 195800800 | 195802231 | ENSG00000072274 | TFRC | 0.2929012 | + |
| 646 | 1556 | 20947 | chr8 | 103372298 | 103373854 | ENSG00000104517 | UBR5 | 0.291370225 | + |
| 647 | 1557 | 04013 | chr11 | 16205431 | 16208501 | ENSG00000110693 | SOX6 | −0.289491559 | − |
| 648 | 1558 | 06935 | chr14 | 31416295 | 31425448 | ENSG00000196792 | STRN3 | −0.287741171 | − |
| 649 | 1559 | 11737 | chr2 | 128944256 | 128945188 | ENSG00000136731 | UGGT1 | −0.286640606 | − |
| 650 | 1560 | 02879 | chr10 | 17746429 | 17747740 | ENSG00000136738 | STAM | −0.285602456 | − |
| 651 | 1561 | 20719 | chr7 | 77407654 | 77408131 | ENSG00000187257 | RSBN1L | −0.285228365 | − |
| 652 | 1562 | 17108 | chr4 | 52729602 | 52744020 | ENSG00000109184 | DCUN1D4 | −0.283579414 | − |
| 653 | 1563 | 21844 | chr9 | 102722198 | 102722437 | ENSG00000136874 | STX17 | −0.283108654 | − |
| 654 | 1564 | 12598 | chr2 | 234296902 | 234299129 | ENSG00000077044 | DGKD | 0.28152101 | + |
| 655 | 1565 | 00556 | chr1 | 167935866 | 167944253 | ENSG00000143164 | DCAF6 | −0.281376187 | − |
| 656 | 1566 | 19977 | chr7 | 111926927 | 111927129 | ENSG00000198839 | ZNF277 | −0.281018353 | − |
| 657 | 1567 | 02334 | chr1 | 89236034 | 89237562 | ENSG00000065243 | PKN2 | −0.280668473 | − |
| 658 | 1568 | 17522 | chr5 | 111611022 | 111643187 | ENSG00000129595 | EPB41L4A | −0.280356159 | − |
| 659 | 1569 | 06933 | chr14 | 31416295 | 31420150 | ENSG00000196792 | STRN3 | −0.279320036 | − |
| 660 | 1570 | 05228 | chr12 | 120995084 | 120995485 | ENSG00000022840 | RNF10 | −0.278784866 | − |
| 661 | 1571 | 19200 | chr6 | 170855190 | 170858201 | ENSG00000008018 | PSMB1 | −0.276150872 | − |
| 662 | 1572 | 20976 | chr8 | 109462051 | 109468159 | ENSG00000104412 | EMC2 | −0.275735656 | − |
| 663 | 1573 | 21101 | chr8 | 131164981 | 131181313 | ENSG00000153317 | ASAP1 | −0.272436284 | − |
| 664 | 1574 | 20069 | chr7 | 131071878 | 131084192 | ENSG00000128585 | MKLN1 | −0.271776986 | − |
| 665 | 1575 | 14335 | chr21 | 47819503 | 47822397 | ENSG00000160299 | PCNT | 0.270707487 | + |
| 666 | 1576 | 04811 | chr11 | 85722072 | 85742653 | ENSG00000073921 | PICALM | 0.270078678 | + |
| 667 | 1577 | 11938 | chr2 | 162036124 | 162061304 | ENSG00000136560 | TANK | −0.267208245 | − |
| 668 | 1578 | 12288 | chr2 | 202208892 | 202216174 | ENSG00000155749 | ALS2CR12 | −0.266117708 | − |
| 669 | 1579 | 15165 | chr3 | 150834124 | 150845771 | ENSG00000144893 | MED12L | 0.265293687 | + |
| 670 | 1580 | 20975 | chr8 | 109462051 | 109462721 | ENSG00000104412 | EMC2 | −0.261534879 | − |
| 671 | 1581 | 08355 | chr15 | 66044716 | 66048810 | ENSG00000174485 | DENND4A | −0.259935274 | − |
| 672 | 1582 | 09860 | chr17 | 41256138 | 41256973 | ENSG00000012048 | BRCA1 | −0.259776938 | − |
| 673 | 1583 | 05579 | chr12 | 32751430 | 32764217 | ENSG00000139132 | FGD4 | 0.25903045 | + |
| 674 | 1584 | 01085 | chr1 | 207820661 | 207828620 | ENSG00000244703 | CD46P1 | −0.258975588 | − |
| 675 | 1585 | 02595 | chr10 | 112356155 | 112358048 | ENSG00000108055 | SMC3 | −0.256162842 | − |
| 676 | 1586 | 06256 | chr13 | 21305979 | 21306260 | ENSG00000150456 | N6AMT2 | −0.254616892 | − |
| 677 | 1587 | 04491 | chr11 | 65267990 | 65268121 | ENSG00000251562 | MALAT1 | −0.254540106 | − |
| 678 | 1588 | 21280 | chr8 | 21832180 | 21837714 | ENSG00000130227 | XPO7 | −0.252240898 | − |
| 679 | 1589 | 19230 | chr6 | 18236682 | 18237747 | ENSG00000124795 | DEK | −0.25029879 | − |
| 680 | 1590 | 02255 | chr1 | 77672324 | 77676174 | ENSG00000142892 | PIGK | −0.249922354 | − |
| 681 | 1591 | 10689 | chr18 | 29432408 | 29432626 | ENSG00000153339 | TRAPPC8 | 0.249647437 | + |
| 682 | 1592 | 08145 | chr15 | 60734614 | 60737990 | ENSG00000128915 | NARG2 | −0.24428689 | − |
| 683 | 1593 | 16950 | chr4 | 37633006 | 37640126 | ENSG00000181826 | RELL1 | −0.244144099 | − |
| 684 | 1594 | 16304 | chr3 | 8977554 | 8983488 | ENSG00000070950 | RAD18 | 0.243189302 | + |
| 685 | 1595 | 16003 | chr3 | 47139444 | 47144913 | ENSG00000181555 | SETD2 | −0.241271464 | − |
| 686 | 1596 | 23019 | chrX | 154528097 | 154528458 | ENSG00000155962 | CLIC2 | −0.240340585 | − |
| 687 | 1597 | 20241 | chr7 | 151181822 | 151195266 | ENSG00000106615 | RHEB | −0.239763518 | − |
| 688 | 1598 | 12807 | chr2 | 32312560 | 32314674 | ENSG00000021574 | SPAST | −0.238945495 | − |
| 689 | 1599 | 23171 | chrX | 67731690 | 67742759 | ENSG00000181704 | YIPF6 | 0.237642343 | + |
| 690 | 1600 | 12531 | chr2 | 227771508 | 227779067 | ENSG00000144468 | RHBDD1 | 0.237572322 | + |
| 691 | 1601 | 18517 | chr5 | 76758919 | 76760634 | ENSG00000164253 | WDR41 | −0.237516399 | − |
| 692 | 1602 | 15527 | chr3 | 185638891 | 185639914 | ENSG00000136527 | TRA2B | −0.233742808 | − |
| 693 | 1603 | 15305 | chr3 | 169694733 | 169703653 | ENSG00000008952 | SEC62 | −0.231918034 | − |
| 694 | 1604 | 22668 | chr9 | 86297865 | 86301070 | ENSG00000135018 | UBQLN1 | −0.231396117 | − |
| 695 | 1605 | 21527 | chr8 | 52758220 | 52773806 | ENSG00000168300 | PCMTD1 | 0.22970906 | + |
| 696 | 1606 | 04781 | chr11 | 85707868 | 85714494 | ENSG00000073921 | PICALM | 0.229644698 | + |
| 697 | 1607 | 15556 | chr3 | 193374868 | 193385069 | ENSG00000198836 | OPA1 | −0.229630322 | − |
| 698 | 1608 | 16517 | chr4 | 129857809 | 129891623 | ENSG00000151466 | SCLT1 | −0.228977881 | − |
| 699 | 1609 | 08315 | chr15 | 65994642 | 65995346 | ENSG00000174485 | DENND4A | −0.227421726 | − |
| 700 | 1610 | 19101 | chr6 | 155095122 | 155116273 | ENSG00000213079 | SCAF8 | 0.227418193 | + |
| 701 | 1611 | 21658 | chr8 | 71071739 | 71075089 | ENSG00000140396 | NCOA2 | 0.226746325 | + |
| 702 | 1612 | 09532 | chr17 | 27160969 | 27161344 | ENSG00000173065 | FAM222B | 0.226375798 | + |
| 703 | 1613 | 16574 | chr4 | 140046317 | 140060651 | ENSG00000109381 | ELF2 | 0.225090987 | + |
| 704 | 1614 | 18512 | chr5 | 76342171 | 76344097 | ENSG00000164252 | AGGF1 | 0.223464328 | + |
| 705 | 1615 | 14107 | chr21 | 17205666 | 17214859 | ENSG00000155313 | USP25 | 0.223298494 | + |
| 706 | 1616 | 21420 | chr8 | 37971709 | 37976881 | ENSG00000129691 | ASH2L | 0.222854832 | + |
| 707 | 1617 | 22434 | chr9 | 3488775 | 3490345 | ENSG00000080298 | RFX3 | −0.222562079 | − |
| 708 | 1618 | 03355 | chr10 | 70719561 | 70720005 | ENSG00000165732 | DDX21 | 0.219375254 | + |
| 709 | 1619 | 10521 | chr18 | 13037235 | 13040955 | ENSG00000101639 | CEP192 | −0.219207234 | − |
| 710 | 1620 | 16492 | chr4 | 128995614 | 129003460 | ENSG00000138709 | LARP1B | −0.218474838 | − |
| 711 | 1621 | 20383 | chr7 | 23224688 | 23226765 | ENSG00000136243 | NUPL2 | 0.217804105 | + |
| 712 | 1622 | 07724 | chr15 | 31266516 | 31269158 | ENSG00000166912 | MTMR10 | −0.215163364 | − |
| 713 | 1623 | 21531 | chr8 | 52773404 | 52773806 | ENSG00000168300 | PCMTD1 | −0.21410755 | − |
| 714 | 1624 | 07279 | chr14 | 55647930 | 55650471 | ENSG00000126787 | DLGAP5 | −0.212145422 | − |
| 715 | 1625 | 19458 | chr6 | 42630995 | 42633983 | ENSG00000024048 | UBR2 | −0.209515648 | − |
| 716 | 1626 | 22716 | chr9 | 88307603 | 88327481 | ENSG00000135049 | AGTPBP1 | −0.209103823 | − |
| 717 | 1627 | 13376 | chr2 | 74300675 | 74307718 | ENSG00000187605 | TET3 | −0.208832195 | − |
| 718 | 1628 | 09780 | chr17 | 38551700 | 38552717 | ENSG00000131747 | TOP2A | −0.207376107 | − |
| 719 | 1629 | 20641 | chr7 | 66458203 | 66459328 | ENSG00000126524 | SBDS | 0.206299772 | + |
| 720 | 1630 | 13248 | chr2 | 64083439 | 64085070 | ENSG00000169764 | UGP2 | 0.205403768 | + |
| 721 | 1631 | 02469 | chr1 | 9991948 | 9994918 | ENSG00000162441 | LZIC | −0.203608619 | − |
| 722 | 1632 | 03025 | chr10 | 31661946 | 31676195 | ENSG00000148516 | ZEB1 | 0.201711818 | + |
| 723 | 1633 | 03075 | chr10 | 32854485 | 32873232 | ENSG00000150076 | C10ORF68 | −0.200304746 | − |
| 724 | 1634 | 19518 | chr6 | 4891946 | 4892613 | ENSG00000153046 | CDYL | −0.199527565 | − |
| 725 | 1635 | 03513 | chr10 | 91511102 | 91522592 | ENSG00000138182 | KIF20B | −0.199045211 | − |
| 726 | 1636 | 17257 | chr4 | 77065301 | 77065626 | ENSG00000138750 | NUP54 | −0.196900723 | − |
| 727 | 1637 | 03656 | chr10 | 98667021 | 98667504 | ENSG00000196233 | LCOR | −0.195915307 | − |
| 728 | 1638 | 15717 | chr3 | 197592293 | 197593090 | ENSG00000186001 | LRCH3 | −0.195801766 | − |
| 729 | 1639 | 05517 | chr12 | 28408513 | 28412375 | ENSG00000123106 | CCDC91 | −0.195185653 | − |
| 730 | 1640 | 20627 | chr7 | 65595730 | 65599361 | ENSG00000241258 | CRCP | 0.194915841 | + |
| 731 | 1641 | 15459 | chr3 | 182602540 | 182605501 | ENSG00000058063 | ATP11B | 0.194190746 | + |
| 732 | 1642 | 07824 | chr15 | 41648236 | 41669502 | ENSG00000137804 | NUSAP1 | −0.192452614 | − |
| 733 | 1643 | 19559 | chr6 | 56915571 | 56920595 | ENSG00000168116 | KIAA1586 | −0.191962941 | − |
| 734 | 1644 | 17227 | chr4 | 73956383 | 73958017 | ENSG00000132466 | ANKRD17 | −0.191278185 | − |
| 735 | 1645 | 08494 | chr15 | 77657504 | 77681144 | ENSG00000173517 | PEAK1 | 0.190411294 | + |
| 736 | 1646 | 20064 | chr7 | 131060182 | 131084192 | ENSG00000128585 | MKLN1 | −0.190090712 | − |
| 737 | 1647 | 06896 | chr14 | 31139461 | 31144271 | ENSG00000092108 | SCFD1 | −0.189779123 | − |
| 738 | 1648 | 13805 | chr20 | 39721111 | 39729993 | ENSG00000198900 | TOP1 | 0.188631066 | + |
| 739 | 1649 | 15234 | chr3 | 157839891 | 157841780 | ENSG00000174891 | RSRC1 | −0.188143907 | − |
| 740 | 1650 | 18114 | chr5 | 36982266 | 36986403 | ENSG00000164190 | NIPBL | 0.187975589 | + |
| 741 | 1651 | 22270 | chr9 | 17330629 | 17342442 | ENSG00000044459 | CNTLN | −0.187514331 | − |
| 742 | 1652 | 09250 | chr16 | 72122885 | 72124685 | ENSG00000140830 | TXNL4B | 0.187490707 | + |
| 743 | 1653 | 18068 | chr5 | 179976930 | 179980471 | ENSG00000113300 | CNOT6 | 0.18705281 | + |
| 744 | 1654 | 21532 | chr8 | 52773420 | 52773806 | ENSG00000168300 | PCMTD1 | 0.184831559 | + |
| 745 | 1655 | 10651 | chr18 | 2718155 | 2718432 | ENSG00000101596 | SMCHD1 | 0.184800168 | + |
| 746 | 1656 | 13115 | chr2 | 58311223 | 58316858 | ENSG00000028116 | VRK2 | −0.183814521 | − |
| 747 | 1657 | 18933 | chr6 | 13579682 | 13584457 | ENSG00000124523 | SIRT5 | −0.182083653 | − |
| 748 | 1658 | 22782 | chr9 | 98740342 | 98766983 | ENSG00000182150 | ERCC6L2 | −0.181217059 | − |
| 749 | 1659 | 22389 | chr9 | 33948371 | 33956144 | ENSG00000137073 | UBAP2 | −0.180446169 | − |
| 750 | 1660 | 16786 | chr4 | 170428187 | 170429482 | ENSG00000137601 | NEK1 | −0.180057374 | − |
| 751 | 1661 | 17237 | chr4 | 74852759 | 74852887 | ENSG00000163736 | PPBP | 0.179149328 | + |
| 752 | 1662 | 12672 | chr2 | 242099746 | 242102816 | ENSG00000115685 | PPP1R7 | 0.178794715 | + |
| 753 | 1663 | 06705 | chr13 | 95813442 | 95840796 | ENSG00000125257 | ABCC4 | −0.176068897 | − |
| 754 | 1664 | 18425 | chr5 | 72157634 | 72161556 | ENSG00000083312 | TNPO1 | 0.175732494 | + |
| 755 | 1665 | 17203 | chr4 | 6995910 | 7002978 | ENSG00000132405 | TBC1D14 | −0.17425856 | − |
| 756 | 1666 | 21660 | chr8 | 71126137 | 71128999 | ENSG00000140396 | NCOA2 | −0.174239515 | − |
| 757 | 1667 | 00651 | chr1 | 172525008 | 172526934 | ENSG00000094975 | SUCO | 0.173485924 | + |
| 758 | 1668 | 17135 | chr4 | 54292038 | 54294350 | ENSG00000145216 | FIP1L1 | −0.172407695 | − |
| 759 | 1669 | 06702 | chr13 | 95813442 | 95822882 | ENSG00000125257 | ABCC4 | −0.171000298 | − |
| 760 | 1670 | 20191 | chr7 | 141755799 | 141782010 | ENSG00000257335 | MGAM | 0.17013547 | + |
| 761 | 1671 | 09521 | chr17 | 26490568 | 26499644 | ENSG00000087095 | NLK | −0.169494931 | − |
| 762 | 1672 | 01122 | chr1 | 21097422 | 21100103 | ENSG00000127483 | HP1BP3 | −0.168563183 | − |
| 763 | 1673 | 12330 | chr2 | 203329531 | 203332412 | ENSG00000204217 | BMPR2 | −0.166786705 | − |
| 764 | 1674 | 05912 | chr12 | 69983264 | 69987393 | ENSG00000166226 | CCT2 | −0.166663778 | − |
| 765 | 1675 | 02086 | chr1 | 61577042 | 61578015 | ENSG00000162599 | NFIA | 0.166193266 | + |
| 766 | 1676 | 10343 | chr17 | 65941524 | 65944422 | ENSG00000171634 | BPTF | −0.164705882 | − |
| 767 | 1677 | 20291 | chr7 | 156619298 | 156629579 | ENSG00000105983 | LMBR1 | −0.160626296 | − |
| 768 | 1678 | 14199 | chr21 | 37711076 | 37717005 | ENSG00000159256 | MORC3 | 0.154418454 | + |
| 769 | 1679 | 21045 | chr8 | 124349864 | 124351686 | ENSG00000156802 | ATAD2 | 0.153641031 | + |
| 770 | 1680 | 14325 | chr21 | 47768925 | 47769734 | ENSG00000160299 | PCNT | 0.153108926 | + |
| 771 | 1681 | 19798 | chr6 | 90556280 | 90566918 | ENSG00000118412 | CASP8AP2 | −0.153053021 | − |
| 772 | 1682 | 02845 | chr10 | 15875628 | 15889942 | ENSG00000148481 | FAM188A | −0.152980029 | − |
| 773 | 1683 | 03993 | chr11 | 16117541 | 16119234 | ENSG00000110693 | SOX6 | −0.151781747 | − |
| 774 | 1684 | 16545 | chr4 | 129913321 | 129925031 | ENSG00000151466 | SCLT1 | 0.151559153 | + |
| 775 | 1685 | 06880 | chr14 | 31050069 | 31050322 | ENSG00000092140 | G2E3 | −0.149358981 | − |
| 776 | 1686 | 18314 | chr5 | 64824278 | 64825026 | ENSG00000123219 | CENPK | 0.148684367 | + |
| 777 | 1687 | 20221 | chr7 | 148543561 | 148544397 | ENSG00000106462 | EZH2 | −0.147611287 | − |
| 778 | 1688 | 07570 | chr14 | 90397884 | 90398971 | ENSG00000140025 | EFCAB11 | 0.14601488 | + |
| 779 | 1689 | 02091 | chr1 | 61577042 | 61624827 | ENSG00000270742 | RP4- | −0.144497254 | − |
| | | | | | | | 802A10.1 | | |
| 780 | 1690 | 17014 | chr4 | 39915230 | 39927553 | ENSG00000121892 | PDS5A | 0.143294254 | + |
| 781 | 1691 | 13755 | chr20 | 35695126 | 35696589 | ENSG00000080839 | RBL1 | 0.140612985 | + |
| 782 | 1692 | 07121 | chr14 | 50130032 | 50141145 | ENSG00000100479 | POLE2 | 0.140484442 | + |
| 783 | 1693 | 20223 | chr7 | 148543588 | 148544397 | ENSG00000106462 | EZH2 | −0.140309562 | − |
| 784 | 1694 | 00933 | chr1 | 193044949 | 193046180 | ENSG00000116747 | TROVE2 | −0.139596873 | − |
| 785 | 1695 | 07159 | chr14 | 50292584 | 50298079 | ENSG00000165525 | NEMF | −0.138077345 | − |
| 786 | 1696 | 10346 | chr17 | 65941524 | 65972074 | ENSG00000171634 | BPTF | −0.13780517 | − |
| 787 | 1697 | 21643 | chr8 | 68044185 | 68049838 | ENSG00000104218 | CSPP1 | −0.136932953 | − |
| 788 | 1698 | 13454 | chr2 | 9079949 | 9098771 | ENSG00000143797 | MBOAT2 | 0.133919127 | + |
| 789 | 1699 | 18540 | chr5 | 78914469 | 78915906 | ENSG00000164329 | PAPD4 | 0.132799362 | + |
| 790 | 1700 | 18111 | chr5 | 36953719 | 36976504 | ENSG00000164190 | NIPBL | 0.132583843 | + |
| 791 | 1701 | 10507 | chr18 | 12370847 | 12371690 | ENSG00000141385 | AFG3L2 | 0.132359086 | + |
| 792 | 1702 | 18863 | chr6 | 126196034 | 126199516 | ENSG00000111912 | NCOA7 | 0.132255998 | + |
| 793 | 1703 | 00144 | chr1 | 114372213 | 114377061 | ENSG00000134242 | PTPN22 | −0.131778107 | − |
| 794 | 1704 | 03188 | chr10 | 5741487 | 5756170 | ENSG00000108021 | FAM208B | −0.131204074 | − |
| 795 | 1705 | 18463 | chr5 | 72370568 | 72373320 | ENSG00000157107 | FCHO2 | −0.130937396 | − |
| 796 | 1706 | 12665 | chr2 | 24181170 | 24199945 | ENSG00000173960 | UBXN2A | 0.129857265 | + |
| 797 | 1707 | 22491 | chr9 | 37126308 | 37126939 | ENSG00000147905 | ZCCHC7 | −0.129829873 | − |
| 798 | 1708 | 08822 | chr16 | 1859238 | 1859834 | ENSG00000063854 | HAGH | −0.128958795 | − |
| 799 | 1709 | 09342 | chr16 | 89291126 | 89292039 | ENSG00000170100 | ZNF778 | 0.124901078 | + |
| 800 | 1710 | 21674 | chr8 | 74585341 | 74601048 | ENSG00000040341 | STAU2 | 0.124142904 | + |
| 801 | 1711 | 03883 | chr11 | 120343758 | 120348235 | ENSG00000196914 | ARHGEF12 | −0.123923895 | − |
| 802 | 1712 | 19740 | chr6 | 84894904 | 84896341 | ENSG00000135315 | KIAA1009 | 0.123773636 | + |
| 803 | 1713 | 20697 | chr7 | 77210743 | 77212967 | ENSG00000127947 | PTPN12 | −0.123256841 | − |
| 804 | 1714 | 05413 | chr12 | 14599921 | 14610229 | ENSG00000171681 | ATF7IP | 0.123186507 | + |
| 805 | 1715 | 02968 | chr10 | 27431315 | 27434519 | ENSG00000136758 | YME1L1 | −0.121868499 | − |
| 806 | 1716 | 00185 | chr1 | 1158623 | 1159348 | ENSG00000078808 | SDF4 | −0.119575165 | − |
| 807 | 1717 | 22996 | chrX | 147743428 | 147744289 | ENSG00000155966 | AFF2 | −0.118456414 | − |
| 808 | 1718 | 02080 | chr1 | 61575449 | 61578015 | ENSG00000162599 | NFIA | −0.118244481 | − |
| 809 | 1719 | 04138 | chr11 | 33127112 | 33127610 | ENSG00000176102 | CSTF3 | −0.114563088 | − |
| 810 | 1720 | 13631 | chr20 | 32617574 | 32619410 | ENSG00000125970 | RALY | −0.113556294 | − |
| 811 | 1721 | 21883 | chr9 | 111812562 | 111812972 | ENSG00000106771 | TMEM245 | 0.110008883 | + |
| 812 | 1722 | 10514 | chr18 | 12999419 | 13019205 | ENSG00000101639 | CEP192 | −0.108819051 | − |
| 813 | 1723 | 15292 | chr3 | 167754623 | 167759262 | ENSG00000173905 | GOLIM4 | 0.107484468 | + |
| 814 | 1724 | 09077 | chr16 | 58593707 | 58594266 | ENSG00000125107 | CNOT1 | −0.105014078 | − |
| 815 | 1725 | 20343 | chr7 | 17885217 | 17890587 | ENSG00000071189 | SNX13 | 0.10426073 | + |
| 816 | 1726 | 06102 | chr12 | 96717725 | 96728643 | ENSG00000059758 | CDK17 | −0.102490008 | − |
| 817 | 1727 | 21911 | chr9 | 114676884 | 114678116 | ENSG00000148154 | UGCG | −0.10000879 | − |
| 818 | 1728 | 16667 | chr4 | 151719232 | 151729550 | ENSG00000198589 | LRBA | 0.098635477 | + |
| 819 | 1729 | 08476 | chr15 | 76580186 | 76585041 | ENSG00000140374 | ETFA | 0.095064522 | + |
| 820 | 1730 | 02444 | chr1 | 95609446 | 95639445 | ENSG00000152078 | TMEM56 | 0.09412163 | + |
| 821 | 1731 | 17034 | chr4 | 42024854 | 42025401 | ENSG00000014824 | SLC30A9 | −0.093848466 | − |
| 822 | 1732 | 00281 | chr1 | 150202905 | 150204264 | ENSG00000143401 | ANP32E | 0.092891301 | + |
| 823 | 1733 | 03999 | chr11 | 16117541 | 16208501 | ENSG00000110693 | SOX6 | −0.091724724 | − |
| 824 | 1734 | 22667 | chr9 | 86294689 | 86301070 | ENSG00000135018 | UBQLN1 | 0.091306013 | + |
| 825 | 1735 | 22261 | chr9 | 17226200 | 17236586 | ENSG00000044459 | CNTLN | −0.091125079 | − |
| 826 | 1736 | 10952 | chr18 | 76886266 | 76914555 | ENSG00000166377 | ATP9B | −0.089171438 | − |
| 827 | 1737 | 19236 | chr6 | 18256591 | 18258636 | ENSG00000124795 | DEK | −0.088063183 | − |
| 828 | 1738 | 13408 | chr2 | 85875052 | 85875976 | ENSG00000168883 | USP39 | −0.088017214 | − |
| 829 | 1739 | 07053 | chr14 | 39620949 | 39628754 | ENSG00000182400 | TRAPPC6B | −0.086392887 | − |
| 830 | 1740 | 04125 | chr11 | 2991032 | 2993473 | ENSG00000205531 | NAP1L4 | −0.085668582 | − |
| 831 | 1741 | 09176 | chr16 | 69404385 | 69406258 | ENSG00000132604 | TERF2 | 0.084750698 | + |
| 832 | 1742 | 20988 | chr8 | 117668094 | 117671219 | ENSG00000147677 | EIF3H | 0.084610875 | + |
| 833 | 1743 | 18339 | chr5 | 65284462 | 65290692 | ENSG00000112851 | ERBB2IP | −0.080397524 | − |
| 834 | 1744 | 16176 | chr3 | 56694758 | 56707753 | ENSG00000163946 | FAM208A | 0.079486106 | + |
| 835 | 1745 | 11220 | chr19 | 30476129 | 30477324 | ENSG00000105176 | URI1 | −0.078233761 | − |
| 836 | 1746 | 14276 | chr21 | 40600425 | 40601362 | ENSG00000185658 | BRWD1 | −0.077947077 | − |
| 837 | 1747 | 11806 | chr2 | 148730307 | 148733544 | ENSG00000115947 | ORC4 | −0.073487662 | − |
| 838 | 1748 | 07606 | chr14 | 92473983 | 92477416 | ENSG00000100815 | TRIP11 | 0.071182875 | + |
| 839 | 1749 | 17751 | chr5 | 138979956 | 138994551 | ENSG00000131508 | UBE2D2 | −0.070241902 | − |
| 840 | 1750 | 07232 | chr14 | 52977957 | 53011089 | ENSG00000087301 | TXNDC16 | −0.067999092 | − |
| 841 | 1751 | 00197 | chr1 | 117944807 | 117948267 | ENSG00000198162 | MAN1A2 | −0.0648967 | − |
| 842 | 1752 | 18265 | chr5 | 56160560 | 56161804 | ENSG00000095015 | MAP3K1 | −0.064020699 | − |
| 843 | 1753 | 04703 | chr11 | 77336007 | 77336863 | ENSG00000074201 | CLNS1A | −0.063683386 | − |
| 844 | 1754 | 22665 | chr9 | 86293355 | 86301070 | ENSG00000135018 | UBQLN1 | 0.063068015 | + |
| 845 | 1755 | 19216 | chr6 | 17669205 | 17669777 | ENSG00000124789 | NUP153 | −0.062863001 | − |
| 846 | 1756 | 17361 | chr4 | 87967317 | 87968746 | ENSG00000172493 | AFF1 | −0.062349721 | − |
| 847 | 1757 | 09584 | chr17 | 28011580 | 28030080 | ENSG00000141298 | SSH2 | −0.062209042 | − |
| 848 | 1758 | 06777 | chr14 | 103865287 | 103871604 | ENSG00000075413 | MARK3 | 0.061116967 | + |
| 849 | 1759 | 21042 | chr8 | 124346117 | 124348772 | ENSG00000156802 | ATAD2 | 0.060568881 | + |
| 850 | 1760 | 15108 | chr3 | 148164052 | 148173318 | NA | NA | 0.057927058 | + |
| 851 | 1761 | 06177 | chr13 | 113219424 | 113223573 | ENSG00000126216 | TUBGCP3 | −0.0579005 | − |
| 852 | 1762 | 10983 | chr18 | 9182379 | 9221997 | ENSG00000101745 | ANKRD12 | −0.057876407 | − |
| 853 | 1763 | 10604 | chr18 | 21087948 | 21089243 | ENSG00000141452 | C18orf8 | −0.055418355 | − |
| 854 | 1764 | 08542 | chr15 | 85223943 | 85234875 | ENSG00000140612 | SEC11A | 0.054970161 | + |
| 855 | 1765 | 02224 | chr1 | 70758070 | 70781249 | ENSG00000118454 | ANKRD13C | 0.054606996 | + |
| 856 | 1766 | 01705 | chr1 | 29386933 | 29424447 | ENSG00000159023 | EPB41 | 0.054384837 | + |
| 857 | 1767 | 07102 | chr14 | 45705016 | 45706924 | ENSG00000129534 | MIS18BP1 | −0.054279736 | − |
| 858 | 1768 | 04624 | chr11 | 73418464 | 73429763 | ENSG00000175582 | RAB6A | −0.053950256 | − |
| 859 | 1769 | 06763 | chr14 | 102661274 | 102664184 | ENSG00000140153 | WDR20 | 0.053904813 | + |
| 860 | 1770 | 00399 | chr1 | 155691307 | 155695810 | ENSG00000132676 | DAP3 | −0.053660957 | − |
| 861 | 1771 | 10224 | chr17 | 59853761 | 59857762 | ENSG00000136492 | BRIP1 | 0.05142855 | + |
| 862 | 1772 | 16576 | chr4 | 140058783 | 140060651 | ENSG00000109381 | ELF2 | 0.051075392 | + |
| 863 | 1773 | 16378 | chr4 | 105439733 | 105440611 | ENSG00000245384 | AC004053.1 | −0.050390264 | − |
| 864 | 1774 | 08827 | chr16 | 18809246 | 18810156 | ENSG00000170540 | ARL6IP1 | −0.050301092 | − |
| 865 | 1775 | 09125 | chr16 | 68155889 | 68160513 | ENSG00000072736 | NFATC3 | 0.049811818 | + |
| 866 | 1776 | 08521 | chr15 | 80412669 | 80415142 | ENSG00000086666 | ZFAND6 | 0.04971732 | + |
| 867 | 1777 | 22418 | chr9 | 33996220 | 34017187 | ENSG00000137073 | UBAP2 | 0.048875187 | + |
| 868 | 1778 | 17441 | chr4 | 99495607 | 99496056 | ENSG00000168785 | TSPAN5 | 0.046088362 | + |
| 869 | 1779 | 04651 | chr11 | 74500670 | 74528759 | ENSG00000166439 | RNF169 | 0.04506624 | + |
| 870 | 1780 | 10064 | chr17 | 53478829 | 53481229 | ENSG00000108960 | MMD | −0.043505886 | − |
| 871 | 1781 | 11243 | chr19 | 33604672 | 33605325 | ENSG00000076650 | GPATCH1 | −0.041554229 | − |
| 872 | 1782 | 13939 | chr20 | 47685251 | 47686834 | ENSG00000124207 | CSE1L | −0.041440338 | − |
| 873 | 1783 | 20310 | chr7 | 158552176 | 158557544 | ENSG00000117868 | ESYT2 | −0.039332637 | − |
| 874 | 1784 | 12027 | chr2 | 172782046 | 172809519 | ENSG00000128708 | HAT1 | 0.038890112 | + |
| 875 | 1785 | 05780 | chr12 | 58340777 | 58347472 | ENSG00000166896 | XRCC6BP1 | 0.036777678 | + |
| 876 | 1786 | 23021 | chrX | 154645235 | 154649223 | NA | NA | 0.036352385 | + |
| 877 | 1787 | 14612 | chr22 | 41566409 | 41569788 | ENSG00000100393 | EP300 | −0.035726557 | − |
| 878 | 1788 | 12275 | chr2 | 202163960 | 202173973 | ENSG00000155749 | ALS2CR12 | 0.033395502 | + |
| 879 | 1789 | 00568 | chr1 | 168007608 | 168014465 | ENSG00000143164 | DCAF6 | 0.033275143 | + |
| 880 | 1790 | 08122 | chr15 | 59204761 | 59209198 | ENSG00000137776 | SLTM | −0.032521344 | − |
| 881 | 1791 | 01196 | chr1 | 213251037 | 213290752 | ENSG00000136643 | RPS6KC1 | −0.032028145 | − |
| 882 | 1792 | 08360 | chr15 | 66641397 | 66641775 | ENSG00000075131 | TIPIN | 0.030872075 | + |
| 883 | 1793 | 16383 | chr4 | 106155053 | 106158508 | ENSG00000168769 | TET2 | −0.030773502 | − |
| 884 | 1794 | 11998 | chr2 | 171884848 | 171902872 | ENSG00000198586 | TLK1 | −0.030704957 | − |
| 885 | 1795 | 06802 | chr14 | 103923478 | 103928798 | ENSG00000075413 | MARK3 | 0.03038484 | + |
| 886 | 1796 | 08341 | chr15 | 66021409 | 66031213 | ENSG00000174485 | DENND4A | 0.029114553 | + |
| 887 | 1797 | 15592 | chr3 | 195780288 | 195803993 | ENSG00000072274 | TFRC | 0.027473612 | + |
| 888 | 1798 | 02669 | chr10 | 119100490 | 119104960 | ENSG00000165650 | PDZD8 | −0.026742711 | − |
| 889 | 1799 | 22521 | chr9 | 4823547 | 4827033 | ENSG00000120158 | RCL1 | 0.025254641 | + |
| 890 | 1800 | 14172 | chr21 | 35138178 | 35140132 | ENSG00000205726 | ITSN1 | −0.023931854 | − |
| 891 | 1801 | 22227 | chr9 | 139115608 | 139118720 | ENSG00000165661 | QSOX2 | 0.019159719 | + |
| 892 | 1802 | 21772 | chr8 | 95897294 | 95897786 | ENSG00000175305 | CCNE2 | −0.017276448 | − |
| 893 | 1803 | 12762 | chr2 | 26505712 | 26505919 | ENSG00000138029 | HADHB | 0.016059531 | + |
| 894 | 1804 | 08619 | chr15 | 93467550 | 93472321 | ENSG00000173575 | CHD2 | 0.015937506 | + |
| 895 | 1805 | 01109 | chr1 | 21076215 | 21100103 | ENSG00000127483 | HP1BP3 | 0.015119097 | + |
| 896 | 1806 | 18951 | chr6 | 13639794 | 13644961 | ENSG00000010017 | RANBP9 | 0.014679425 | + |
| 897 | 1807 | 01465 | chr1 | 235963619 | 235964397 | ENSG00000143669 | LYST | −0.013840453 | − |
| 898 | 1808 | 03064 | chr10 | 32759991 | 32762951 | ENSG00000216937 | CCDC7 | 0.012950478 | + |
| 899 | 1809 | 19408 | chr6 | 41839301 | 41859613 | ENSG00000164663 | USP49 | −0.012058437 | − |
| 900 | 1810 | 21222 | chr8 | 142264087 | 142264728 | ENSG00000022567 | SLC45A4 | 0.011653698 | + |
| 901 | 1811 | 21894 | chr9 | 114148656 | 114154104 | ENSG00000136813 | KIAA0368 | 0.011310291 | + |
| 902 | 1812 | 17147 | chr4 | 56277780 | 56284152 | ENSG00000134851 | TMEM165 | 0.010589367 | + |
| 903 | 1813 | 12555 | chr2 | 231222519 | 231226412 | ENSG00000185404 | SP140L | −0.010261584 | − |
| 904 | 1814 | 03671 | chr10 | 99196173 | 99197507 | ENSG00000171311 | EXOSC1 | −0.008914606 | − |
| 905 | 1815 | 15853 | chr3 | 33725850 | 33738425 | ENSG00000163539 | CLASP2 | 0.007974047 | + |
| 906 | 1816 | 15700 | chr3 | 197541778 | 197547301 | ENSG00000186001 | LRCH3 | 0.007744757 | + |
| 907 | 1817 | 03351 | chr10 | 70547683 | 70548085 | ENSG00000060339 | CCAR1 | 0.006380515 | + |
| 908 | 1818 | 11660 | chr2 | 120684173 | 120692534 | ENSG00000088179 | PTPN4 | −0.003481975 | − |
| 909 | 1819 | 00498 | chr1 | 160293220 | 160302347 | ENSG00000122218 | COPA | −0.003328713 | − |
| 910 | 1820 | 11490 | chr19 | 8538547 | 8539128 | ENSG00000099783 | HNRNPM | +0.0001735361 | + |

“SEQ ID NO: junction” refers to the SEQ ID NO: encoding the sequence surrounding the exon-exon junction in a head-to-tail arrangement, i.e. 20 nucleotides upstream and 20 nucleotides downstream of the actual junction.
“SEQ ID NO: full length” refers to the SEQ ID NO: encoding the entire sequence identified for the respective circRNA. Importantly, these sequences do not comprise any intronic sequences which are assumed to be spliced out during circRNA biogenesis.
“circID” indicates the internal reference bloodCirc_# of the inventors.
“chr” denotes the chromosome the circRNA is stemming from (chrM is the mitochondrial chromosome).
“start” and “stop” indicate where on the respective chromosome the start and the stop of the circRNA encoding sequence is found. The reference sequence is hg19 downloaded from the UCSC genome browser (see Kent WJ, Sugnet CW, Furey TS, Roskin KM, Pringle TH, Zahler AM, et al.; The human genome browser at UCSC. Genome Research. 2002 June; 12(6): 996-1006).
“gene” and “gene_name” denote the gene as annotated in the UCSC genome browser and the commonly used name, respectively.
“NA” indicated that the gene is not yet annotated.
The “score” is calculated by subtracting the mean values of each circRNA in the two groups (healthy and diseased (Alzheimer's)) and dividing by the highest standard deviation (cp. FIG. 15). Negative score = decreased levels or absence of the respective circRNA found in samples of diseased subjects. Positive score = increased levels and/or presence of the respective circRNA found in samples of diseased subjects diseased.
“diseased” denotes whether increased levels or presence of the respective circRNA are indicative for the presence of the neurodegenerative disease (“+”), or whether decreased levels or absence of the respective circRNA are indicative for the presence of a neurodegenerative disease (“−”).
The sequences in the Sequence Listing are DNA sequences encoding the actual circRNA. Hence, the actual circRNA is the listed sequence with “T” being exchanged by an “U”.
The 910 circRNAs listed here resulted from an expression cut-off on all detected circRNAs in the sample set. This cut-off was chosen such, that a Principle Component Anlaysis (PCA, see above) is not affected by expression noise.

[0089] As outlined herein, it may be desirable to determine the presence or absence, or the level of more than on circRNA in order to increase the diagnostic significance of the method according to the present invention. Hence, in a preferred embodiment of the method for diagnosing a neurodegenerative disease the levels of more than one circRNA comprising a sequence encoded by a sequence selected from the group consisting of SEQ ID NO:1 to SEQ ID NO:910, or a sequence having at least 70% identity thereto, are determined and compared to the respective control level. The identity is preferably at least 80%, more preferably at least 90%, more preferably at least 95%. In a preferred embodiment the levels of at least 100 circRNAs comprising a sequence encoded by a sequence selected from the group consisting of SEQ ID NO:1 to SEQ ID NO:910, or a sequence having at least 70% identity thereto, are determined in a sample of a bodily fluid of said subject and controlled to the respective control level; preferably the levels of at least 150 circRNAs and more preferably the levels of at least 200 circRNAs comprising a sequence encoded by a sequence selected from the group consisting of nt 11 to 30 of any one of SEQ ID NO:1 to SEQ ID NO:910, or a sequence having at least 70% identity thereto, are determined in a sample of a bodily fluid of said subject and controlled to the respective control level. The identity is preferably at least 80%, more preferably at least 90%, more preferably at least 95% to the respective sequences in the SEQ ID NO:.

[0090] In one embodiment the circRNAs comprising a sequence encoded by SEQ ID NOs:1 to 910 have the sequence as determined by the inventors, i.e. have a sequence encoded by the sequence of any of SEQ ID NOs: 911 to 1820. Hence, in one embodiment of the method for diagnosing a neurodegenerative disease the levels of more than one circRNAs having a sequence being at least 70% identical to any of the sequences as encoded by SEQ ID NO: 911 to 1820 are determined in a sample of a bodily fluid of said subject and controlled to the respective control level. Particularly preferred the levels of at least 100 circRNAs having a sequence being at least 70% identical to any of the sequences as encoded by SEQ ID NOs: 911 to 1820 are determined in a sample of a bodily fluid of said subject and controlled to the respective control level, preferably the levels of at least 150, and more preferably the levels of at least 200 circRNAs having a sequence being at least 70% identical to any of the sequences as encoded by SEQ ID NOs: 911 to 1820 are determined in a sample of a bodily fluid of said subject and controlled to the respective control level. In more preferred embodiments said sequence identity is at least 80%, preferably at least 90%, more preferably at least 95%, yet more preferably at least 99% to the outlined sequences. In a further preferred embodiment the circRNAs have the sequences as encoded by any one of SEQ ID NOs: 911 to 1820. The levels are preferably detected by using hybridization probes specifically hybridizing the sequences of nt 11 to 30 of SEQ ID NO:1 to 910 or specifically hybridizing to the sequences of SEQ ID NO:1 to 910, or an RNA sequence encoded by these sequences, or the respective reverse complements thereof.

[0091] The inventors found that the first 200 circRNAs as encoded by SEQ ID NO:1 to 910 have particular suited predictive and diagnostic values. Hence, in a preferred embodiment of the method for diagnosing a neurodegenerative disease said at least 100, preferably at least 150 more preferably at least 200 circRNAs comprise a sequence as encoded by any of SEQ ID NO:1 to SEQ ID NO:200, or a sequence having at least 70% identity thereto, or the circRNAs have a sequence as encoded by any of SEQ ID NO: 911 to 1110, or a sequence having at least 70% identity thereto. The identity is preferably at least 80%, more preferably at least 90%, more preferably at least 95%. In a preferred embodiment of the method for diagnosing a neurodegenerative disease the levels of more than one circRNA comprising a sequence encoded by a sequence being at least 70% identical to a sequence selected from the group consisting of the sequence of nt 11 to nt 30 of any one of SEQ ID NO: 1 to 200 are determined in a sample of a bodily fluid of said subject and controlled to the respective control level. Particularly preferred the levels of at least 100 circRNAs comprising a sequence encoded by a sequence being at least 70% identical to a sequence selected from the group consisting of the sequence of nt 11 to nt 30 of any one of SEQ ID NO: 1 to 200 are determined in a sample of a bodily fluid of said subject and controlled to the respective control level, preferably of at least 150 and more preferably the levels of all 200 circRNAs comprising a sequence encoded by a sequence being at least 70% identical to a sequence selected from the group consisting of the sequence of nt 11 to nt 30 of any one of SEQ ID NO: 1 to 200 are determined in a sample of a bodily fluid of said subject and controlled to the respective control level. The identity is preferably at least 80%, more preferably at least 90%, more preferably at least 95%, yet more preferred 100%. The levels are preferably detected by using hybridization probes specifically hybridizing the sequences of nt 11 to 30 of SEQ ID NO:1 to 200 or specifically hybridizing to the sequences of SEQ ID NO:1 to 200, or an RNA sequence encoded by these sequences, or the reverse complements thereof

[0092] In one embodiment the circRNAs comprising a sequence encoded by any of the SEQ ID NOs:1 to 200 have the sequence as determined by the inventors, i.e. a sequence encoded by any of the SEQ ID NOs: 911 to 1110. Hence, in one embodiment of the method for diagnosing a neurodegenerative disease the levels of more than one circRNA having a sequence encoded by a sequence being at least 70% identical to any of the sequences of SEQ ID NO: 911 to 1110 are determined in a sample of a bodily fluid of said subject and controlled to the respective control level. Particularly preferred the levels of at least 100 circRNAs having a sequence encoded by a sequence being at least 70% identical to any of the sequences of SEQ ID NOs: 911 to 1110 are determined in a sample of a bodily fluid of said subject and controlled to the respective control level, preferably the levels of at least 150, and more preferably the levels of at least 200 circRNAs having a sequence encoded by a sequence being at least 70% identical to any of the sequences of SEQ ID NOs: 911 to 1110 are determined in a sample of a bodily fluid of said subject and controlled to the respective control level. In more preferred embodiments said sequence identity is at least 80%, preferably at least 90%, more preferably at least 95%, yet more preferably at least 99% to the outlined sequences. In a further preferred embodiment the circRNAs have the sequences encoded by the sequences as set out in any one of SEQ ID NOs: 911 to 1110. The levels are preferably detected by using hybridization probes specifically hybridizing the sequences of nt 11 to 30 of SEQ ID NO:1 to 200 or specifically hybridizing to the sequences of SEQ ID NO:1 to 200, or an RNA sequence encoded by these sequences, or the reverse complements thereof.

[0093] The determination of percent identity between two sequences is accomplished using the mathematical algorithm of Karlin and Altschul (1993) Proc. Natl. Acad. Sci. USA 90: 5873-5877. Such an algorithm is incorporated into the BLASTN and BLASTP programs of Altschul et al. (1990) J. Mol. Biol. 215: 403-410. BLAST nucleotide searches are performed with the BLASTN program, score=100, word length=12, to obtain nucleotide sequences homologous to the nucleic acid sequences outlined herein. BLAST protein searches are performed with the BLASTP program, score=50, wordlength=3, to obtain amino acid sequences homologous to the EPO variant polypeptide, respectively. To obtain gapped alignments for comparative purposes, Gapped BLAST is utilized as described in Altschul et al. (1997) Nucleic Acids Res. 25: 3389-3402. When utilizing BLAST and Gapped BLAST programs, the default parameters of the respective programs are used.

[0094] In order to improve the diagnostic value, it may be desirable to determine the number of circRNAs showing increased or decreased levels being indicative for the neurodegenerative disease as outlined in Table 1. In a preferred embodiment the number of circRNAs showing increased or decreased levels being indicative for the neurodegenerative disease as outlined in Table 1 is above the 80% percentile of a control population, more preferably above the 90% percentile, yet more preferred above the 95% percentile. In a preferred embodiment of the method for diagnosing a neurodegenerative disease the presence of increased or decreased levels as defined in Table 1 under “disease” for the respective circRNA for at least 10, preferably at least 50, more preferably at least 100 circRNAs are indicative for the presence of a neurodegenerative disease, preferably Alzheimer's disease.

[0095] In one particular embodiment of the method for diagnosing a neurodegenerative disease the levels of all circRNAs comprising a sequence encoded by a sequence selected from the group consisting of nt 11 to 30 of any of SEQ ID NO:1 to SEQ ID NO:200, or a sequence having at least 70% identity thereto; wherein preferably the presence of increased or decreased levels as defined in Table 1 under “disease” for at least 10, preferably at least 50, more preferably at least 100 of the respective circRNAs are indicative for the presence of a neurodegenerative disease, preferably Alzheimer's disease. Preferably, said method comprises the determination of the levels of all circRNAs comprising a sequence encoded by a sequence selected from the group consisting of any of SEQ ID NO:1 to SEQ ID NO:200 or a sequence having at least 70% identity thereto, wherein preferably the presence of increased or decreased levels as defined in Table 1 under “disease” for at least 10, preferably at least 50, more preferably at least 100 of the respective circRNAs are indicative for the presence of a neurodegenerative disease, preferably Alzheimer's disease. Further preferred, all circRNAs with a sequence encoded by a sequence having at least 70% identity to a sequence selected from the group consisting of SEQ ID NO:911 to SEQ ID NO:1110 are detected, wherein preferably the presence of increased or decreased levels as defined in Table 1 under “disease” for at least 10, preferably at least 50, more preferably at least 100 of the respective circRNAs are indicative for the presence of a neurodegenerative disease, preferably Alzheimer's disease. In more preferred embodiments said sequence identity is at least 80%, preferably at least 90%, more preferably at least 95%, yet more preferably at least 99% to the outlined sequences, yet more preferred the identity is 100%.

[0096] In one particular embodiment of the method for diagnosing a neurodegenerative disease the levels of all circRNAs comprising a sequence encoded by a sequence selected from the group consisting of nt 11 to 30 of any of SEQ ID NO:1 to SEQ ID NO:910, or a sequence having at least 70% identity thereto; wherein preferably the presence of increased or decreased levels as defined in Table 1 under “disease” for at least 10, preferably at least 50, more preferably at least 100 of the respective circRNAs are indicative for the presence of a neurodegenerative disease, preferably Alzheimer's disease. Preferably, said method comprises the determination of the levels of all circRNAs comprising a sequence encoded by a sequence selected from the group consisting of any of SEQ ID NO:1 to SEQ ID NO:910 or a sequence having at least 70% identity thereto, wherein preferably the presence of increased or decreased levels as defined in Table 1 under “disease” for at least 10, preferably at least 50, more preferably at least 100 of the respective circRNAs are indicative for the presence of a neurodegenerative disease, preferably Alzheimer's disease. Further preferred, all circRNAs with a sequence encoded by a sequence having at least 70% identity to a sequence selected from the group consisting of SEQ ID NO:911 to SEQ ID NO:1820 are detected, wherein preferably the presence of increased or decreased levels as defined in Table 1 under “disease” for at least 10, preferably at least 50, more preferably at least 100 of the respective circRNAs are indicative for the presence of a neurodegenerative disease, preferably Alzheimer's disease. In more preferred embodiments said sequence identity is at least 80%, preferably at least 90%, more preferably at least 95%, yet more preferably at least 99% to the outlined sequences, yet more preferred the identity is 100%.

[0097] As outlined herein above, the circRNAs may be specifically detected through their unique sequence at the exon-exon junction in the head-to-tail arrangement. Hence, the invention also relates to a nucleic acid probe specifically hybridizing to a sequence of nucleotide (nt) 11 to nt 30 of any of the sequences of SEQ ID NO:1 to 910, or specifically hybridizing to a RNA sequence encoded by these sequences, or specifically hybridizing to a reverse complement sequences thereof, preferably specifically binding to any of the sequences of SEQ ID NO:1 to 910, or specifically hybridizing to a RNA sequence encoded by these sequences, or specifically hybridizing to a reverse complement sequences thereof. In a very preferred embodiment the nucleic acid probe spans the sequence of nt 15 to nt 35 of the respective SEQ ID NO: 1 to 910, of RNA sequence encoded by these sequences, or the reverse complement sequences thereof.

[0098] Nucleic acid probes may be prepared using any suitable method, such as, for example, the phosphotriester and phosphodiester methods or automated embodiments thereof. In one such automated embodiment diethylophosphoramidites are used as starting materials and may be synthesized as described by Beaucage et al., Tetrahedron Letters, 22:1859-1862 (1981), which is hereby incorporated by reference. One method for synthesizing oligonucleotides on a modified solid support is described in U.S. Pat. No. 4,458,006, which is hereby incorporated by reference. It is also possible to use a nucleic acid probes which has been isolated from a biological source (such as a restriction endonuclease digest). Preferred nucleic acid probes have a length of from about 15 to 500, more preferably about 20 to 200, most preferably about 25 to 60 bases.

[0099] The nucleic acid probe according to the present invention may be hybridization probe or as a primer for amplification reactions. In both cases the nucleic acid probe may comprise fluorescent dyes. Such fluorescent dyes may for example be FAM (5- or 6-carboxyfluorescein), VIC, NED, fluorescein, FITC, IRD-700/800, CY3, CY5, CY3.5, CY5.5, HEX, TET, TAMRA, JOE, ROX, BODIPY TMR, Oregon Green, Rhodamine Green, Rhodamine Red, Texas Red, Yakima Yellow, Alexa Fluor, PET and the like (see e.g. https://www.micro-shop.zeiss.com/us/us_en/spektral.php). In the context of the present invention, fluorescent dyes may for example be FAM (5- or 6-carboxyfluorescein), VIC, NED, fluorescein, fluorescein isothiocyanate (FITC), IRD-700/800, cyanine dyes, auch as CY3, CY5, CY3.5, CY5.5, Cy7, xanthen, 6-carboxy-2′,4′,7′,4,7-hexachlorofluorescein (HEX), TET, 6-carboxy-4′,5′-dichloro-2′,7′-dimethodyfluorescein (JOE), N,N,N′,N′-Tetramethyl-6-carboxyrhodamine (TAMRA), 6-carboxy-X-rhodamine (ROX), 5-Carboxyrhodamine-6G (R6G5), 6-carboxyrhodamine-6G (RG6), Rhodamine, Rhodamine Green, Rhodamine Red, Rhodamine 110, BODIPY dyes, such as BODIPY TMR, Oregon Green, coumarines such as Umbelliferone, benzimides, such as Hoechst 33258; phenanthridines, such as Texas Red, Yakima Yellow, Alexa Fluor, PET, ethidium bromide, acridinium dyes, carbazol dyes, phenoxazine dyes, porphyrin dyes, polymethin dyes, and the like.

[0100] In a preferred embodiment, the nucleic acid probe specifically hybridizing to the sequence of nucleotide 11 to 30 of a sequence selected from the group consisting of the sequences listed in Table 1, or specifically hybridizing to a RNA sequence encoded by these sequences, or specifically hybridizing to a reverse complement sequences thereof; preferably specifically hybridizing to a sequence selected from the group consisting of the sequences listed in Table 1, or specifically hybridizing to a RNA sequence encoded by these sequences, or specifically hybridizing to a reverse complement sequences thereof.

[0101] The invention furthermore relates to a kit for specifically detecting one or more, preferably more than one nucleic acids comprising a sequence selected from the group consisting of nt 11 to nt 30 of any one of SEQ ID NO: 1 to 910, or a sequence selected from the group consisting of SEQ ID NO:1 to 910, or SEQ ID NO:911 to SEQ ID NO:1820, or an RNA sequence encoded by any of these sequences. The kit is preferably a kit for diagnosing a neurodegenerative disease, comprising means for specifically detecting one or more nucleic acid sequence selected from the group consisting of SEQ ID NO:1 to 910 or SEQ ID NO:911 to SEQ ID NO:1820, or an RNA sequence encoded by any of these sequences. In a preferred embodiment the kit comprises means for specifically detecting at least 100, preferably at least 150 more preferably at least 200 nucleic acid sequences selected from the group consisting of SEQ ID NO:1 to SEQ ID NO:910 or SEQ ID NO:911 to SEQ ID NO:1820, or an RNA sequence encoded by any of these sequences.

[0102] The means for detecting preferably are one or more of the nucleic acid probes according to the invention. Hence, in one embodiment the kit comprises one or more nucleic acid probes, preferably more than one nucleic acid probe specifically hybridizing to the sequence of nucleotide 11 to 30 of a sequence selected from the group consisting of SEQ ID NO:1 to SEQ ID NO:910, or an RNA sequence encoded by these sequences, or the reverse complements thereof; preferably the kit comprises a plurality of nucleic acid probes specifically hybridizing to the sequence of nucleotide 11 to 30 of at least 100, preferably at least 150, more preferably at least 200 nucleic acid sequences selected from the group consisting of SEQ ID NO:1 to SEQ ID NO:910, or a RNA sequence encoded by these sequences, or the reverse complements thereof. In a particular preferred embodiment the kit comprises a plurality of nucleic acid probes hybridizing to the sequence of nucleotide 11 to 30 of at least 100, preferably at least 150, more preferably at least 200 nucleic acid sequences selected from the group consisting of SEQ ID NO:1 to 200, or the RNA sequences encoded by these sequences, or the reverse complements thereof; preferably the kit comprises a plurality of nucleic acid probes hybridizing to the sequence of nucleotide 11 to 30 of all of the sequences of SEQ ID NO:1 to 200, or the RNA sequences encoded by these sequences, or the reverse complements thereof.

[0103] In a further particular preferred embodiment the kit comprises a plurality of nucleic acid probes hybridizing to the sequence of at least 100, preferably at least 150, more preferably at least 200 nucleic acid sequences selected from the group consisting of SEQ ID NO:1 to 200, or an RNA sequence encoded by these sequences, or the reverse complements thereof; preferably the kit comprises a plurality of nucleic acid probes hybridizing to the sequence of all of the sequences of SEQ ID NO:1 to 200, or the RNA sequences encoded by these sequences, or the reverse complements thereof.

[0104] The kit may further comprise means for handling and/or preparation of a bodily fluid sample, preferably for cerebrospinal fluid or whole blood. In a preferred embodiment the kit comprises a container for collecting whole blood, said container comprising stabilizing agents, preferably selected from the group consisting of chelating agents, EDTA, K₂EDTA, formulations like RNAlater (Qiagen) or such, or combinations thereof. In a particular preferred embodiment the kit comprises a K₂EDTA coated container.

[0105] As used herein, a kit is a packaged combination optionally including instructions for use of the combination and/or other reactions and components for such use.

[0106] Furthermore, the invention relates to an array for determining the presence or level of a plurality of nucleic acids, said array comprising a plurality of probes, wherein the plurality of probes specifically hybridize to the sequence of nucleotide 11 to 30 of a sequence selected from the group consisting of SEQ ID NO:1 to SEQ ID NO:910, or an RNA sequence encoded by these sequences, or the reverse complements thereof, preferably the plurality of probes comprises probes specifically hybridizing to the sequence of nucleotide 11 to 30 of at least 100, preferably at least 150 more preferably at least 200 nucleic acid sequences selected from the group consisting of SEQ ID NO:1 to SEQ ID NO:910, or the RNA sequences encoded by these sequences, or the reverse complements thereof. Preferably the plurality of probes comprises probes specifically hybridizing to the sequence of nucleotide 11 to 30 of SEQ ID NO:1 to SEQ ID NO:200, or the RNA sequences encoded by these sequences, or the reverse complements thereof.

[0107] Herein an “array” is a solid support comprising one or more nucleic acids attached thereto. Arrays, such as microarrays (e.g. from Affimetrix®) are known in the art Schena M^{I}, Shalon D, Davis R W, Brown P O (1995); Quantitative monitoring of gene expression patterns with a complementary DNA microarray. Science 270(5235):467-70. The solid support may be made of different nature including, but not limited to, those made of plastics, resins, polysaccharides, silica or silica-based materials, functionalized glass, modified silicon, carbon, metals, inorganic glasses, membranes, nylon, natural fibers such as silk, wool and cotton, and polymers. hi some embodiments, the material comprising the solid support has reactive groups such as carboxy, amino, hydroxy, etc., which are used for attachment of, e.g. nucleic acid probes. Polymers are preferred, and suitable polymers include, but are not limited to, polystyrene, polyethylene glycol tetraphthalate, polyvinyl acetate, polyvinyl chloride, polyvinyl pyrrolidone, polyacrylonitrile, polymethyl methacrylate, polytetrafluoroethylene, butyl rubber, styrenebutadiene rubber, natural rubber, polyethylene, polypropylene, (poly)tetrafluoroethylene, (poly)vinylidenefluoride, polycarbonate and polymethylpentene. Preferred polymers include those outlined in U.S. Pat. No. 5,427,779, hereby expressly incorporated by reference. The nucleic acid probes are preferably covalent attachment to the solid support of the array. Attachment may be performed as described below. As will be appreciated by those in the art, either the 5′ or 3′ terminus may be attached to the support using techniques known in the art. The arrays of the invention comprise at least two different covalently attached nucleic acid probes, with more than two being preferred. By “different” oligonucleotide herein is meant an oligonucleotide that has a nucleotide sequence that differs in at least one position from the sequence of a second oligonucleotide; that is, at least a single base is different, preferably their hybridization specificity is as outlined herein above.

[0108] Furthermore, the invention particularly relates to the use of a nucleic acid probe specifically hybridizing to the sequence of nucleotide 11 to 30 of a sequence selected from the group consisting of SEQ ID NO:1 to SEQ ID NO:910, and the RNA sequences encoded by these sequences, or hybridizing to the reverse complement thereof for the diagnosis of a neurodegenerative disease, preferably for the diagnosis of Alzheimer's disease The invention also relates to the use of a kit according to the invention for the diagnosis of a neurodegenerative disease, preferably for the diagnosis of Alzheimer's disease. Also encompassed by the invention is the use of an array according to the invention for the diagnosis of a neurodegenerative disease, preferably for the diagnosis of Alzheimer's disease.

[0109] The present invention also relates to the following items:
[0110] 1. A method for diagnosing a disease of a subject, comprising the step of:
   [0111] determining the presence or absence of one or more circular RNA (circRNA) in a sample of a bodily fluid of said subject;
   [0112] wherein the presence or absence of said one or more circRNA is indicative of the disease.
[0113] 2. The method according to item 1, wherein said disease is not a disease of said bodily fluid.
[0114] 3. The method according to item 1 or 2, wherein said bodily fluid is blood or cerebrospinal fluid, most preferred whole blood.
[0115] 4. The method according to any one of items 1 to 3, wherein the determination step comprises:
   [0116] determining the level of said one or more circRNA;
   [0117] comparing the determined level to a control level of said one or more circRNA;
   [0118] wherein differing levels between the determined and the control level are indicative of the disease.
[0119] 5. The method according to item 4, wherein said one or more circRNA is differentially expressed between the diseased and non-diseased state in the tissue of interest.
[0120] 6. The method according to any one of items 1 to 5, wherein the circRNA is detected by detection of an exon-exon-junction in a head-to-tail arrangement.
[0121] 7. The method according to item 6, wherein circRNA is detected using a method selected from the group consisting of probe hybridization based methods, nucleic acid amplification based methods, and nucleic acid sequencing.
[0122] 8. The method according to any one of items 1 to 7, wherein the sample is treated with RNase R before determination of the circRNA.
[0123] 9. The method according to any one of items 1 to 8, wherein more than one circRNAs from a panel of circRNAs are determined.
[0124] 10. The method according to item 9, wherein said panel comprises a plurality of circRNAs that have been identified as being present at differing levels in bodily fluid samples of patients having the disease and patients not having the disease, preferably identified by principle component analysis or clustering.
[0125] 11. The method according to any one of items 4 to 10, wherein the disease is a neurodegenerative disease, preferably Alzheimer's disease.
[0126] 12. The method according to item 11, wherein the method for diagnosing the neurodegenerative disease, preferably Alzheimer's disease, in a subject comprises the steps of:
   [0127] determining the level of one or more circRNA in a sample of a bodily fluid of said subject;
   [0128] comparing the determined level to a control level of said one or more circRNA;
   [0129] wherein differing levels between the determined and the control level are indicative of the disease.
[0130] 13. The method according to item 12, wherein said one or more circRNA comprises a sequence encoded by a sequence being at least 70% identical to a sequence selected from the group consisting of nucleotides 11 to 30 of any of the sequences of SEQ ID NO:1 to SEQ ID NO:910, preferably wherein the presence of increased or decreased levels as defined in Table 1 under “disease” for the circRNA comprising the respective sequence are indicative of the presence of a neurodegenerative disease, preferably Alzheimer's disease.
[0131] 14. The method according to item 13, wherein said one or more circRNA has a sequence encoded by a sequence having at least 70% identity to a sequence selected from the group consisting of SEQ ID NO:911 to SEQ ID NO:1820, preferably wherein the presence of increased or decreased levels as defined in Table 1 under “disease” for the circRNA having the respective sequence are indicative of the presence of a neurodegenerative disease, preferably Alzheimer's disease.
[0132] 15. The method according to any of items 12 to 13, wherein the levels of at least 100, preferably at least 150 and more preferably at least 200 circRNAs comprising a sequence encoded by a sequence being at least 70% identical to a sequence selected from the group consisting of SEQ ID NO:1 to SEQ ID NO:910 are determined in a sample of a bodily fluid of said subject and controlled to the respective control level.
[0133] 16. The method according to item 15, wherein said at least 100, preferably at least 150 and more preferably at least 200 circRNAs have a sequence encoded by a sequence selected from the group consisting of SEQ ID NO:911 to 1820, or a sequence being at least 70% identical thereto.
[0134] 17. The method according to item 15 or 16, wherein said at least 100, preferably at least 150 more preferably at least 200 circRNAs comprise a sequence encoded by a sequence having at least 70% identity to a sequence selected from the group consisting of SEQ ID NO:1 to SEQ ID NO:200, or said circRNAs have a sequence having at least 70% identity to a sequence selected from the group consisting of SEQ ID NO: 911 to 1110.
[0135] 18. The method according to item 15, wherein the presence of increased or decreased levels as defined in Table 1 under “disease” for the respective circRNA for at least 10, preferably at least 50, more preferably at least 100 of said at least 100, preferably at least 150 and more preferably at least 200 circRNAs are indicative of the presence of a neurodegenerative disease, preferably Alzheimer's disease.
[0136] 19. The method according to any one of items 13 to 16, wherein the levels of all circRNAs comprising a sequence encoded by a sequence having at least 70% identity to a sequence selected from the group consisting of SEQ ID NO:1 to SEQ ID NO:910 or all circRNAs having a sequence encoded by a sequence having at least 70% identity to a sequence selected from the group consisting of SEQ ID NO:911 to SEQ ID NO:1820 are detected, wherein preferably the presence of increased or decreased levels as defined in Table 1 under “disease” for at least 10, preferably at least 50, more preferably at least 100 of the respective circRNAs are indicative of the presence of a neurodegenerative disease, preferably Alzheimer's disease.
[0137] 20. A nucleic acid probe specifically hybridizing to the sequence of nucleotide 11 to 30 of a sequence selected from the group consisting of the sequences listed in Table 1, or specifically hybridizing to a reverse complement sequence thereof; preferably specifically hybridizing to a sequence selected from the group consisting of the sequences listed in Table 1, or specifically hybridizing to a reverse complement sequence thereof
[0138] 21. A kit for diagnosing a neurodegenerative disease, comprising means for specifically detecting one or more nucleic acid sequence encoded by a sequence selected from the group consisting of SEQ ID NO:1 to 910 or SEQ ID NO:911 to SEQ ID NO:1820, or a sequence being at least 70% identical to the recited sequences.
[0139] 22. The kit of item 20, wherein the kit comprises means for specifically detecting at least 100, preferably at least 150 more preferably at least 200 nucleic acid sequences encoded by a sequence having at least 70% identity to a sequence selected from the group consisting of SEQ ID NO:1 to SEQ ID NO:910 or SEQ ID NO:911 to SEQ ID NO:1820.
[0140] 23. The kit of item 21 or 22, wherein the kit comprises one or more nucleic acid probes specifically hybridizing to the sequence of nucleotide 11 to 30 of a sequence selected from the group consisting of SEQ ID NO:1 to SEQ ID NO:910, and the RNA sequences encoded by a sequence of SEQ ID NO:1 to SEQ ID NO:910, or hybridizing the reverse complements thereof, preferably the kit comprises probes specifically hybridizing to the sequence of nucleotide 11 to 30 of at least 100, preferably at least 150 more preferably at least 200 nucleic acid sequences selected from the group consisting of SEQ ID NO:1 to SEQ ID NO:910, and the RNA sequences encoded by a sequence of SEQ ID NO:1 to SEQ ID NO:910, or hybridizing to the reverse complements thereof
[0141] 24. The kit according to any on of items 21 to 23, further comprising means for handling and/or preparation of a bodily fluid sample, preferably for cerebrospinal fluid or whole blood.
[0142] 25. An array for determining the presence or level of a plurality of nucleic acids, comprising a plurality of probes, wherein the plurality of probes specifically hybridize to the sequence of nucleotide 11 to 30 of a sequence selected from the group consisting of SEQ ID NO:1 to SEQ ID NO:910, and the RNA sequences encoded by a sequence of SEQ ID NO:1 to SEQ ID NO:910, or hybridizing the reverse complements thereof, preferably the plurality of probes comprises probes specifically hybridizing to the sequence of nucleotide 11 to 30 of at least 100, preferably at least 150 more preferably at least 200 nucleic acid sequences selected from the group consisting of SEQ ID NO:1 to SEQ ID NO:910, and the RNA sequences encoded by a sequence of SEQ ID NO:1 to SEQ ID NO:910, or specifically hybridizing to the reverse complement sequences thereof, preferably the plurality of probes comprises probes specifically hybridizing to the sequence of nucleotide 11 to 30 of SEQ ID NO:1 to SEQ ID NO:200, and the RNA sequences encoded by a sequence of SEQ ID NO:1 to SEQ ID NO:200, or hybridizing to the reverse complement sequences thereof.
[0143] 26. Use of a nucleic acid probe specifically hybridizing to the sequence of nucleotide 11 to 30 of a sequence selected from the group consisting of SEQ ID NO:1 to SEQ ID NO:910, and the RNA sequences encoded by a sequence of SEQ ID NO:1 to SEQ ID NO:910, or hybridizing to the reverse complement thereof, a kit according to items 21 to 24, or an array according to item 25 for the diagnosis of a neurodegenerative disease, preferably for the diagnosis of Alzheimer's disease.

[0144] It will be apparent that the methods and components of the present invention, as well as the uses as substantially described herein or illustrated in the description and the examples, are also subject of the present invention and claimed herewith. In this respect, it is also understood that the embodiments as described in the description and/or any one of the examples, can be independently used and combined with any one of the embodiments described hereinbefore and claimed in the appended claims set. Thus, these and other embodiments are disclosed and encompassed by the description and examples of the present invention.

[0145] The invention is further illustrated by the following non-limiting Examples and Figures.

### EXAMPLES

[0146] 1. Methods

[0147] 1.1 Whole Blood Sample Collection

[0148] Blood sampling was approved by the Charité ethics committee, registration number EA4/078/14 and all participants gave written informed consent. 5 mL blood were drawn from subjects by venipuncture and collected in K₂EDTA coated Vacutainer (BD, #368841) and stored on ice until used for RNA preparation. For downstream RNA analysis by sequencing or qPCR assays presented here, 100 μL blood (>1 μg total RNA) is sufficient.

[0149] 1.2 RNA Isolation and RNase R Treatment

[0150] Total RNA was isolated from fresh whole blood samples. Blood was diluted 1:3 in PBS and 250 μL of the dilution were used for RNA preparation using 750 μL Trizol LS reagent (Life Technology). Samples were homogenized by gentle vortexing and 200 μL chloroform was added. After centrifugation at 4° C., 15 min at full speed in a table top centrifuge, the aqueous phase was collected to a new tube (typically 400 μL). RNA was precipitated by adding an equal volume of cold isopropanol and incubation for ≥1 hour at −80° C. RNA pellets were recovered by spinning at 4° C., 30 min at full speed in a table top centrifuge. RNA pellets were washed with 1 mL 80% EtOH and subsequently air dried at room temperature for 5 min. The RNA was resuspended in 20 μL RNase-free water and treated with DNase I (Promega) for 15 min at 37° C. with subsequent heat inactivation for 10 min at 65° C. HEK293 total RNA was prepared in the same way but using 1 mL Trizol on cell pellets. For sequencing experiments the RNA preparations were additionally subjected to two rounds of ribosomal RNA depletion using a RiboMinus Kit (Life Technologies K1550-02 and A15020). Total RNA integrity and rRNA depletion were monitored using a Bioanalyzer 2001 (Agilent Technologies). For qPCR analysis the samples were treated with RNase R (Epicentre) for 15 min at 37° C. at a concentration of 3 U/μg RNA. After treatment 5% C. elegans total RNA was spiked-in followed by phenol-chloroform extraction of the RNA mixture. For controls the RNA was mock treated without the enzyme.

[0151] 1.3 cDNA Library Preparation for Deep Sequencing

[0152] cDNA libraries were generated according to the Illumina TruSeq protocol. Sample RNA was fragmented, adaptor ligated, amplified and sequenced on an Illumina HiSeq2000 in 1×100 cycle runs.

[0153] 1.4 Quantitative PCR (qPCR)

[0154] Total RNA was reverse transcribed using Maxima reverse transcriptase (Thermo Scientific) according to the manufacturer's protocol. qPCR reactions were performed using Maxima SYBR Green/Rox (Thermo Scientific) on a StepOne Plus System (Applied Biosystems). Primer sequences are available in the Table 7. RNase R assays were normalized to C. elegans RNA spike-in RNA.

[0155] 1.5 Sanger Sequencing

[0156] PCR products were size separated by agarose gel electrophoresis, amplicons were extracted from gels and Sanger sequenced by standard methods (Eurofins).

[0157] 1.6 Detection and Annotation of circRNAs

[0158] The detection of circular RNA was based on a previously published method (see Memczak S, Jens M, Elefsinioti A, et al. Circular RNAs are a large class of animal RNAs with regulatory potency. Nature. 2013; 495(7441):333-338) with the following details. Human reference genome hg19 (February 2009, GRCh37) was downloaded from the UCSC genome browser (see Kent W J, Sugnet C W, Furey T S, et al. The human genome browser at UCSC. Genome Research. 2002; 12(6):996-1006) and was used for all subsequent analysis. bowtie2 (version 2.1.0 (see Langmead B, Salzberg S L. Fast gapped-read alignment with Bowtie 2. Nature Methods. 2012; 9(4):357-359) was employed for mapping of RNA sequencing reads. Reads were mapped to ribosomal RNA sequence data downloaded from the UCSC genome browser. Reads that do not map to rRNA were extracted for further processing. In a second step, all reads that mapped to the genome by aligning the whole read without any trimming (end-to-end mode) were neglected. Reads not mapping continuously to the genome were used for circRNA candidate detection. From those 20 nucleotide terminal sequences (anchors) were extracted and re-aligned independently to the genome. The anchor alignments were then extended until the full read sequence was covered. Consecutively aligning anchors indicate linear splicing events whereas alignment in reverse orientation indicates head-to-tail splicing as observed in circRNAs (FIG. 1A). The resulting splicing events were filtered using the following criteria 1) GT/AG signal flanking the splice sites 2) unambiguous breakpoint detection 3) maximum of two mismatches when extending the anchor alignments 4) breakpoint no more than two nucleotides inside the alignment of the anchors 5) at least two independent reads supporting the head-to-tail splice junction 6) a minimum difference of 35 in the bowtie2 alignment score between the first and the second best alignment of each anchor 7) no more than 100 kilobases distance between the two splice sites.

[0159] 1.7 circRNA Annotation

[0160] Genomic coordinates of circRNA candidates were intersected with published gene models (ENSEMBL, release 75 containing 22,827 protein coding genes, 7484 lincRNAs and 3411 miRNAs). circRNAs were annotated and exon-intron structure predicted as previously described (see Memczak S, Jens M, Elefsinioti A, et al. Circular RNAs are a large class of animal RNAs with regulatory potency. Nature. 2013; 495(7441):333-338). Known introns in circRNAs were assumed to be spliced out. Each circRNA was counted to a gene structure category if it overlaps fully or partially with the respective ENSEMBL feature (FIG. 1C, Table 1).

[0161] 1.8 Published RNA Data Sets

[0162] In this study rRNA depleted RNA-seq data from whole blood samples (own data), fetal cerebellum (ENCODE accession: ENCSR000AEW) fetal liver (ENCODE accession: ENCSR000AFB) and HEK293 (Table 1; see Ivanov A, Memczak S, Wyler E, et al. Analysis of Intron Sequences Reveals Hallmarks of Circular RNA Biogenesis in Animals. CellReports. 2015; 10(2):170-177) was used. Expression values, coordinates and other details of the circRNAs reported here and all associated scripts will be made available at www.circbase.org (see Glažar P, Papavasileiou P, Rajewsky N. circBase: a database for circular RNAs. RNA. 2014; 20(11):1666-1670).

[0163] 1.9 Quantification of circRNA and Host Gene Expression

[0164] The number of reads that span a particular head-to-tail junction were used as a measure for circRNA expression. To allow comparison of expression between samples, raw read counts were normalized to sequencing depth by dividing by the number of reads that map to protein coding gene regions and multiply by 1,000,000 (FIG. 1B left, FIG. 4 C-D, FIGS. 6 and 10 A,C). To estimate host gene expression, RNA-seq data were first mapped to the reference genome with STAR (see Dobin A, Davis C A, Schlesinger F, et al. STAR: ultrafast universal RNA-seq aligner. Bioinformatics. 2013; 29(1):15-21). htseq-count (see Anders S, Pyl P T, Huber W. HTSeq—A Python framework to work with high-throughput sequencing data. 2014) was employed to count hits on genomic features of ENSEMBL gene models. The measure transcripts per million (TPM) was calculated for each transcript and sample in order to compare total host gene expression between samples (FIG. 1B, right).

[0165] Circular-to-linear ratios were calculated for each circRNA by dividing raw head-to-tail read counts by the median number of reads that span linear spliced junctions of the respective host gene. For both measures one pseudo count was added to avoid division by zero. CircRNAs from host genes without annotated splice junctions according to the ENSEMBL gene annotation, were not considered in this analysis.

[0166] For analysis in FIG. 3D a permutation test with 1000 Monte-Carlo replications was performed on pooled biological replicate data to approximate the exact conditional distribution. To adjust for different dataset sizes the respective larger data set of each comparison was randomly subsampled.

[0167] 1.10 Principal Component Analysis and Clustering

[0168] To perform principal component analysis (PCA) of circRNA expression in whole blood samples of different donors, variance stabilizing transformation was first performed on raw head-to-tail spliced read counts using the R package DESeq2 (see Love M I, Huber W, Anders S. Moderated estimation of fold change and dispersion for RNA-seq data with DESeq2. Genome Biology. 2014; 15(12):550). Only circRNAs with a transformed expression value of at least 6.7 (n=910, FIG. 4A) in one of the samples were considered for the analysis. PCA was performed on all remaining circRNAs using the prcomp function of R's stats package. All genes that give rise to these circRNAs and have at least one known splice junction were considered for PCA of the linear host gene expression. Same procedure was used for PCA using the median number of linear spliced reads as a proxy for linear expression. 200 circRNAs with the highest weight in PC2 were considered for clustering. Raw head-to-tail spliced read counts for each circRNA (nᵢ) were normalized to sequencing depth by dividing by the number of reads that map to protein coding gene regions multiplied by 1,000,000. Whole blood samples of different donors were clustered on log₂ transformed normalized circRNA expression profiles (log₂(nᵢ+1)). Hierarchical, agglomerative clustering was performed with complete linkage and by using Spearman's rank correlation as distance metric (1−{corr [log(n, +1)]}). The same procedure was used for linear host gene expression using the median number of linear spliced reads for all genes that give rise to these 200 circRNAs and have at least one known splice site.

[0169] 2. Results

[0170] 2.1 Thousands of circRNAs are Reproducibly Detected in Human Peripheral Whole Blood

[0171] First it was determined whether circRNAs are present in standard clinical blood specimen. To this end, total RNA was prepared from two biologically independent human peripheral whole blood samples and depleted ribosomal RNAs (see Methods, supra). The samples were reverse transcribed using random primers to allow for circRNA detection and sequencing libraries were produced (FIG. 1A). The raw reads were fed into our in silico circRNA detection pipeline (see Memczak S, Jens M, Elefsinioti A, et al. Circular RNAs are a large class of animal RNAs with regulatory potency. Nature. 2013; 495(7441):333-338). In short, the program filters reads that map continuously to the genome but saves unmapped reads. From those, terminal 20-mer anchors are extracted and independently aligned to the genome. If the anchors map in reverse orientation and can be extended to cover the whole read sequence, they are flagged as head-to-tail junction spanning, i.e. indicative for circRNAs. Anchors that aligned consecutively were used to determine linear splicing as an internal library quality control and to assess linear RNA isoform expression (Table 2).

[0172] From the RNA of two human donors we identified 4550 and 4105 unique circRNA candidates, respectively, by at least two independent reads spanning a head-to-tail splice junction (FIG. 1B). In both datasets the number of total reads and linear splicing events were respectively similar, indicating reproducible sample preparation (Table 2, Table 5). When considering RNAs found in both samples, we observed a high correlation of expression for both linear (R=0.98) as well as circRNAs (R=0.80, FIG. 1B). Between the two samples 1265 circRNAs (55%) with more than 5 reads overlap and 2442 (39%) circRNAs supported by at least 2 reads are shared (Table 1, FIG. 15, FIG. 5, technical reproducibility is shown in FIG. 6). The later set will be considered as reproducibly detected circRNAs in the following analysis. CircRNA candidates are derived from genes covering the whole dynamic range of RNA expression (FIG. 1B, right panel). As observed in other human samples, we find that most circRNAs are derived from protein coding exonic regions or 5′ UTR sequences (FIG. 1C; see Memczak S, Jens M, Elefsinioti A, et al. Circular RNAs are a large class of animal RNAs with regulatory potency. Nature. 2013; 495(7441):333-338, and Rybak-Wolf A, Stottmeister C, Glažar P, et al. Circular RNAs in the Mammalian Brain Are Highly Abundant, Conserved, and Dynamically Expressed. MOLCEL. 2015; 1-17). GO term enrichment analysis on reproducibly detected, top expressed circRNAs and the same number of top linear RNAs showed significant enrichment of different biological function annotations (FIG. 7). Together with the broad expression spectrum of corresponding host genes this finding argues that circRNA expression levels are largely independent of linear RNA isoform abundance.

[0173] The predicted spliced length of blood circRNAs of 200-800 nt (median=343 nt) is similar to that in liver or cerebellum (median=394/448 nt) and previous observations in HEK293 cell cultures and other human samples (FIG. 8 and see Memczak S, Jens M, Elefsinioti A, et al. Circular RNAs are a large class of animal RNAs with regulatory potency. Nature. 2013; 495(7441):333-338). However, we observed a high number of circRNAs per gene, with 23 genes giving rise to more than 10 circRNAs (‘circRNA hotspots’, FIG. 1D).

[0174] To assess the reproducibility of the sequencing results we designed divergent, circRNA specific primers and measured relative abundances of the top eight expressed circRNAs compared to linear control genes in qPCR (FIG. 1E). circRNA candidate 8 could not be unambiguously amplified from cDNA, most likely due to overlapping RNA isoforms and was therefore excluded from further analysis. For the remaining seven circRNA candidates, we tested circularity using previously established assays: 1) resistance to the 3′-5′ exonuclease RNase R and 2) Sanger sequencing of PCR amplicons to confirm the sequence of predicted head-to-tail splice junctions. With these assays we validated 7/7 tested candidates suggesting that the overall false positive rate in our data sets is low (FIG. 9). Interestingly, these circRNAs are expressed from gene loci that so far were not shown to have a specific blood related function (Table 3) but show expression levels that by far exceed expression of housekeeping genes such as VCL or TFRC (10-100 fold, FIG. 1E).

[0175] 2.2 Circular-to-Linear RNA Expression is High in Blood

[0176] When inspecting the read coverage in blood sequencing data, it was noticed that oftentimes the expression of circularized exons was outstandingly high compared to the coverage of neighboring exons expressed in linear RNA isoforms of the same gene. For example, it was observed that the two exons of circRNA candidate 5, which is product of the PCNT locus were densely covered with sequencing reads in the blood samples, while the upstream and downstream exons were barely detected (FIG. 2A). This particular expression pattern was not observed in HEK293 cells, where all exons were equally covered. This observation was further investigated by qPCR, comparing linear to circular RNA expression with isoform specific primer sets in HEK293 and whole blood samples (FIG. 2B, C). This independent assay confirmed dominant expression of the tested candidates which was found to be at least 30-fold higher than the cognate linear isoforms. In contrast, this circRNA domination was not found in HEK293 cells where the same RNAs were probed, which argues for a tissue-specific pattern.

[0177] Thereafter, comparison of the blood data to published ENCODE project datasets from cerebellum, representative of neuronal tissues that in general have high circRNA expression (see Rybak-Wolf A, Stottmeister C, Glažar P, et al. Circular RNAs in the Mammalian Brain Are Highly Abundant, Conserved, and Dynamically Expressed. MOLCEL. 2015; 1-17) and to a non-neuronal primary tissue, liver (Table 2) was performed. Approx. 30% of blood circRNAs are also found in cerebellum while this fraction was around 10% for liver with higher fractions for both cases when constraining the analysis to highly expressed blood circRNAs (FIG. 10 A-D, comparison between total RNAs in FIG. 11). In summary, circRNAs found in human whole blood in part overlap circRNAs expressed in cerebellum of liver, but also contain hundreds of other circRNAs.

[0178] The relative circular to linear RNA isoform abundance on a transcriptome wide scale was then analyzed. To this end, read counts that span head-to-tail junctions and are therefore indicative of circRNAs were compared to the median number of read counts on linear splice site junctions on the same gene, the latter serving as a proxy for linear RNA expression (see Methods, supra). We observed that many blood circRNAs are highly expressed while corresponding linear RNAs show average or low abundances (FIG. 3A), a finding that was recapitulated by qPCR assays validating our approach (FIG. 12). For the control samples cerebellum and liver this pattern was not observed (FIG. 3B, C) as revealed by comparing the mean circular-to-linear RNA ratio, which we found to be significantly higher in blood than in the tested control tissues (FIG. 3D). In summary, blood has an outstanding general tendency to contain circRNAs at high levels while the corresponding linear transcripts are much more lowly expressed. This tendency was only found (to a much lower extent) in cerebellum but not in liver RNA as well as RNA from many other tissues or cell lines that we have analyzed.

[0179] 2.3 circRNAs are Putative Biomarkers in Alzheimer's Disease

[0180] The results show that circRNAs are reproducibly and easily detected in clinical standard blood samples and therefore are well suited to serve as a new class of biomarker for human diseases, like neurodegenerative diseases. Taking into account the high expression of circRNAs in neuronal tissues (see Rybak-Wolf A, Stottmeister C, Glažar P, et al. Circular RNAs in the Mammalian Brain Are Highly Abundant, Conserved, and Dynamically Expressed. MOLCEL. 2015; 1-17) and the urgent need for biomarkers in neurological diseases, circular RNA expression in blood samples from Alzheimer's diseases patients and control subjects (see Methods, supra, Table 2, Table 4) was investigated. To this end, sequencing libraries from whole blood RNA from five individuals of each group were generated. In total 22,644 distinct circRNAs were detected in all samples combined. Then putative disease-specific circRNA expression were identified. Therefore, subsets of all detected circRNA candidates were defined and used these in a principle component analysis to detect expression differences between the two groups. Sorting of all circRNAs by expression and definition of sets for PCA analysis by increasing expression cut-offs was performed. In a range of the top 500 to top 900 circRNAs, a clear separation of control and diseased subjects was detected (FIG. 4A, FIG. 13). Interestingly, this is not observed when analyzing the corresponding linear RNAs, suggesting that there might be disease relevant information specifically encoded in the circular blood transcriptome (FIG. 4B). When the circRNA were sorted out of this analysis by their weight in principle component 2 (PC2) and the data was subjected to unsupervised clustering, again controls and Alzheimer's patients were distinguishable. Importantly, the two main clusters do not reflect the gender or age of the subjects (see also Table 6). The findings of this analysis show that circRNA expression patterns in blood have a diagnostic value, that is not revealed by analyzing the expression of their cognate linear RNA isoforms.

[0181] 3. Discussion

[0182] Recent publications show that circRNAs can be detected in plasma and saliva samples (see Koh W, Pan W, Gawad C, et al. Noninvasive in vivo monitoring of tissue-specific global gene expression in humans. Proceedings of the National Academy of Sciences. 2014; 111(20):7361-7366; and Bahn J H, Zhang Q, Li F, et al. The Landscape of MicroRNA, Piwi-Interacting RNA, and Circular RNA in Human Saliva. Clinical Chemistry. 2014). However, in both specimens only few (10-70) circular RNAs with canonical splice sites were reported, which dramatically limits any further analysis. The circular transcriptome of whole blood presented here, demonstrates that the search for putative circRNA biomarker in peripheral blood is much more suitable to yield informative results. Using RNA-Seq of clinical standard samples showed reproducible detection of around 2400 circRNA candidates that are present in human whole blood. It will be interesting to determine the origin of blood circRNAs. Accumulating evidence suggests that circRNAs are specifically expressed in a developmental stage- and tissue-specific manner, rather than being merely byproducts of splicing reactions (see Memczak S, Jens M, Elefsinioti A, et al. Circular RNAs are a large class of animal RNAs with regulatory potency. Nature. 2013; 495(7441):333-338; and Rybak-Wolf A, Stottmeister C, Glažar P, et al. Circular RNAs in the Mammalian Brain Are Highly Abundant, Conserved, and Dynamically Expressed. MOLCEL. 2015; 1-17). Previously analyzed circRNA from neutrophils, B-cells and hematopoietic stem cells suggest that many circRNAs are constituents of hematocytes (see Salzman J, Gawad C, Wang P L, Lacayo N, Brown P O. Circular RNAs are the predominant transcript isoform from hundreds of human genes in diverse cell types. PLoS ONE. 2012; 7(2):e30733). However, there is also the intriguing possibility of circRNA excretion into the extracellular space, e.g. by vesicles such as exosomes. Likewise, aberrant circRNA expression in disease may reflect, either a condition-specific transcriptome change in blood cells themselves, or a direct consequence of active or passive release of circRNA from diseased tissue.

[0183] Further, we demonstrated that many circRNAs have a high expression compared to linear RNA isoforms from the same locus, a feature that distinguishes blood circRNAs from other primary tissues such as cerebellum or liver. Considering that this was observed for hundreds of blood circRNA candidates (FIG. 3A, Table 1, FIG. 15) and that further restricted the experimental setup to standard samples and preparation procedures. Gene products that are dominated by circRNAs which typically comprise 2-4 exons (example in FIG. 2, FIG. 14) will also dominate signals for the specific gene of interest in array assays, Northern Blots or qPCR experiments if the circularized exon expression is measured.

[0184] After reproducibly detecting thousands of oftentimes highly expressed circRNAs in blood, it was asked whether these might be instrumental in diagnosis of human disease. Therefore measurement of putatively specific circRNA abundances in Alzheimer's disease and control samples was performed.

[0185] It was observed that analyzing specific subsets of blood circular RNAs allows distinguishing Alzheimer's disease from control samples in a principal component analysis and unsupervised clustering. This distinction was not possible when analyzing linear RNA isoforms from the same genomic loci, demonstrating that circRNA expression data bear specific information.

[0186] Given the urgent need for non-invasive biomarker detection for many disease states, these findings show a way for biomarker detection in easily accessible bodily fluid samples; like whole blood and cerebrospinal fluid. These are not being limited to Alzheimer's disease or neurological condition in general, since blood circRNA expression might be specifically altered in many disorders and therefore exploitable as diagnostic tool in human diseases.

TABLE 2
Sequencing statistic of analyzed libraries

| | | | | | | reads | | |
|---|---|---|---|---|---|---|---|---|
| | | | number of reads | | | mapping | | |
| | | | that map | number of reads | | to | | |
| | number of | | continously | used for | number of | protein | | |
| | total | | to | circRNA | linear | coding | number of | |
| | reads | % map | genome | detection | splicing | genes | circRNA | Ensembl |
| Sample | (millions) | to rRNA | (millions) | (millions) | events | (millions) | candidates | accession ID |
| H_1 | 57.85 | 11.52 | 41.75 | 9.45 | 77.367 | 8.47 | 4.550 | |
| rep_H_1 | 169.86 | 11.43 | 122.18 | 28.27 | 107.996 | 24.73 | 9.996 | |
| H_2 | 48.04 | 6.32 | 37.13 | 7.88 | 74.676 | 7.81 | 4.105 | |
| H_3 | 164.93 | 15.44 | 115.02 | 24.44 | 108.870 | 21.25 | 11.113 | |
| H_4 | 171.76 | 47.99 | 75.43 | 13.91 | 94.811 | 13.17 | 5.739 | |
| H_5 | 170.20 | 10.52 | 123.28 | 29.02 | 107.573 | 24.26 | 10.002 | |
| AD_1 | 110.76 | 18.74 | 74.07 | 15.93 | 88.932 | 13.85 | 5.837 | |
| AD_2 | 132.73 | 11.27 | 100.26 | 17.51 | 98.956 | 16.70 | 7.513 | |
| AD_3 | 131.62 | 15.78 | 93.46 | 17.39 | 91.823 | 17.22 | 6.867 | |
| AD_4 | 140.48 | 19.81 | 95.07 | 17.57 | 98.952 | 16.92 | 8.016 | |
| AD_5 | 122.04 | 13.88 | 88.91 | 16.18 | 96.942 | 17.41 | 6.404 | |
| Cerebellum_1 | 87.22 | 0.49 | 76.60 | 18.19 | 113.99 | 22.01 | 6.792 | ENCSR000AEW, |
| | | | | | | | | ENCFF001ROL |
| Cerebellum_2 | 122.00 | 0.14 | 109.82 | 13.18 | 122.375 | 24.63 | 5.786 | ENCSR000AEW, |
| | | | | | | | | ENCFF001RPH |
| Liver_1 | 86.12 | 3.35 | 72.72 | 10.52 | 101.147 | 30.14 | 839 | ENCSR000AFB, |
| | | | | | | | | ENCFF001RNR |
| Liver_2 | 103.53 | 6.95 | 72.01 | 17.41 | 106.969 | 55.07 | 1.557 | ENCSR000AFB, |
| | | | | | | | | ENCFF001RNX |

[0187] Summary of RNA-Sequencing Results

[0188] Sequencing results for blood RNA from five controls (H), five Alzheimer patients (AD), cerebellum and liver control RNA samples. If not noted otherwise sample datasets were produced for this study.

TABLE 3
Details on top expressed circRNA candidates.

| | | | | spliced length in | head-to-tail | |
|---|---|---|---|---|---|---|
| candidate | | host gene annoation | function | nt | read counts | circBase ID |
| 1 | MBOAT2 | membrane bound O- | acyltransferase | 226 | 1367 | hsa_circ_0007334 |
| | | acyltransferase | | | | |
| | | domain containing 2 | | | | |
| 2 | TMEM56 | Transmembrane Protein 56 | unknown | 264 | 676 | hsa_circ_0000095 |
| 3 | DNAJC6 | DnaJ Chaperone Homolog, | regulates chaperone | 302 | 513 | hsa_circ_0002454 |
| | | Subfamily C, Member 6 | activity | | | |
| 4 | UBXN7 | UBX domain protein 7 | Ubiquitin-binding | 183 | 485 | hsa_circ_0001380 |
| | | | adapter | | | |
| 5 | PCNT1 | Pericentrin-13 | component of the | 315 | 344 | hsa_circ_0002903 |
| | | | nuclear pore complex | | | |
| 6 | MORC3 | MORC family CW-type zinc | unknown | 249 | 333 | hsa_circ_0001189 |
| | | finger 3 | | | | |
| 7 | XPO1 | Exportin 1 | nuclear export of | 207 | 333 | hsa_circ_0001017 |
| | | | protein and RNAs | | | |
| 8 | GSE1 | Coiled-Coil Protein Genetic | unknown | 219 | 326 | hsa_circ_0000722 |
| | | Suppressor Element | | | | |

TABLE 4
Patients overview.

| subject | age | diagnosis | stage | MMSE | sex |
|---|---|---|---|---|---|
| H_1 | 31 | control | | | m |
| H_2 | 27 | control | | | m |
| H_3 | 71 | control | | | f |
| H_4 | 65 | control | | | f |
| H_5 | 62 | control | | | m |
| AD_1 | 75 | Alzheimer's Disease | mild | 24 | m |
| AD_2 | 81 | Alzheimer's Disease | mild | 23 | m |
| AD_3 | 73 | Alzheimer's Disease | mild | 25 | f |
| AD_4 | 69 | Alzheimer's Disease | medium | 18 | f |
| AD_5 | 68 | Alzheimer's Disease | severe | 8 | m |

MMSE: Mini Mental State Examination

TABLE 5
Raw reads mapping to hemoglobin genes for blood sample 1 and 2.

| | sample 1 | sample 2 |
|---|---|---|
| total reads | 57,853,921 | 48,035,915 |
| HBA1 | 2,429,755 | 2,016,794 |
| HBA2 | 3,330,428 | 1,891,626 |
| HBB | 3,964,389 | 3,703,140 |
| HBD | 1,016 | 936 |
| sum | 9,725,588 | 7,612,496 |
| % of total | 16.81 | 15.85 |

TABLE 6
Rate of reproducibility after sub-sampling circRNAs
in FIG. 4a 1000 times.

| | % | | % main cluster |
|---|---|---|---|
| % circRNAs | clustering reproduced | % linear RNAs | as in FIG. 4A |
| 90 | 52.2 | 90 | 0 |
| 70 | 31.4 | 70 | 0 |
| 50 | 17.9 | 50 | 0 |

TABLE 7
List of oligonucleotides used in the Examples

| SEQ | | |
|---|---|---|
| ID | | |
| NO: | Name | Sequence |
| 1821 | hsaRTvinculinfwd | CTCGTCCGGGTTGGAAAAGAG |
| 1822 | hsaRTvinculinrev | AGTAAGGGTCTGACTGAAGCAT |
| 1823 | hsaTFRCfwd | ACCATTGTCATATACCCGGTTCA |
| 1824 | hsaTFRCrev | CAATAGCCCAAGTAGCCAATCAT |
| 1825 | celegansEIF3D_fwd | CGCCTTGAACATGGATAACTGCTGGG |
| 1826 | celegansEIF3D_rev | GATCGTCATCCGAGTTCTCCTCGTCG |
| 1827 | hsaMBOAT2div_fwd | AGTGCAAGATAAAGGCCCAAA |
| 1828 | hsaMBOAT2div_rev | TGATCATCATAGGAGTGGAGAACA |
| 1829 | hsaMBOAT2con_fwd | TACTCCACAGGTAATGTTGTAC |
| 1830 | hsaMBOAT2con_rev | ACTTTCATTGAAGGCAGATCATACCA |
| 1831 | hsaDNAJC6div_fwd | CCAGACATCTTGACCACTACACA |
| 1832 | hsaDNAJC6div_rev | ATGTGTCTTTGAGGGTGTCTTT |
| 1833 | hsaDNAJC6con_fwd | TCTCTACTCTACTCCTGGCCCAG |
| 1834 | hsaDNAJC6con_rev | GTAGGTCACACATATAGCCCAGGT |
| 1835 | hsaTMEM56div_fwd | CATCATTGTGCGTCCCTGTATG |
| 1836 | hsaTMEM56div_rev | GCTGAGACTATTGAAACCTGGAGA |
| 1837 | hsaTMEM56con_fwd | GCTGGCATACATTGGGAATTT |
| 1838 | hsaTMEM56con_rev | CAATCCGCACGATGAAGAATAC |
| 1839 | hsaUBXN7div_fwd | ACCAGTATTTCCTGCTTTTGAGG |
| 1840 | hsaUBXN7div_rev | CTACCCTTGCAGATCTATTCCGG |
| 1841 | hsaUBXN7con_fwd | AGAAATCCCGTCACTTGGTCCAA |
| 1842 | hsaUBXN7con_rev | TGACAGTGAGGAAGGTCAGAGA |
| 1843 | hsaGSE1div_fwd | CATCCTCCAGCTTTGCCGCCG |
| 1844 | hsaGSE1div_rev | CTGGTCGCGGTGGAAAGCATC |
| 1845 | hsaGSE1con_fwd | AGCTCAGTTGTGCAGGATTC |
| 1846 | hsaGSE1con_rev | CTTCTCAGGTAGTCCTCGGT |
| 1847 | hsaMORC3div_fwd | CATCCTACGTGGACAGAAAGTGAA |
| 1848 | hsaMORC3div_rev | CTGTTCCGTGGAAAACAGAGAAT |
| 1849 | hsaMORC3con_fwd | CAGTGCAGTTGCTGAATTAATAG |
| 1850 | hsaMORC3con_rev | TCCCATTGTCGGTGAATGTC |
| 1851 | hsaPCNT1div_fwd | CCGGTGTTTAGAAGACTTGGAGTT |
| 1852 | hsaPCNT1div_rev | TGCAGACAGTTCTTTGCGTAGATT |
| 1853 | hsaPCNT1con_fwd | TTGCCATTACTGACCTGGAGAGC |
| 1854 | hsaPCNT1con_rev | CCGTCAATGCCGTCTCCTTCTC |
| 1855 | hsaXPO1div_fwd | TGAAATCAAGCAGCTGACGA |
| 1856 | hsaXPO1div_rev | AGATTCTTCCAAGGAACCAGTG |
| 1857 | hsaXPO1con_fwd | GCCAGGGACAGACATTTGA |
| 1858 | hsaXPO1con_rev | GCTCAAGTAAAGCTCTTTGTGAC |

The application's sequence listing, which the Patent Office published only in electronic form, follows.

SEQUENCE LISTING (1858 sequences)

SEQ ID NO: 1 - DNA, 40 bp, Artificial Sequence
  sequence surrounding the exon-exon junction in a head-to-tail arrangement of bloodCirc_09611
agaggacttagtccgagaagatcaaagaaagtgcatcaca

SEQ ID NO: 2 - DNA, 40 bp, Artificial Sequence
  sequence surrounding the exon-exon junction in a head-to-tail arrangement of bloodCirc_04805
atataccagacctttcacagacttaattcagtgcacaaat

SEQ ID NO: 3 - DNA, 40 bp, Artificial Sequence
  sequence surrounding the exon-exon junction in a head-to-tail arrangement of bloodCirc_06983
catccagagtgcagatgatgagaaatcacagagttgcaaa

SEQ ID NO: 4 - DNA, 40 bp, Artificial Sequence
  sequence surrounding the exon-exon junction in a head-to-tail arrangement of bloodCirc_11279
attaaggagacactggcaagggaacagtaacattcaaaga

SEQ ID NO: 5 - DNA, 40 bp, Artificial Sequence
  sequence surrounding the exon-exon junction in a head-to-tail arrangement of bloodCirc_09640
taaacctactcaaactattgaggctgcctccattcgaaac

SEQ ID NO: 6 - DNA, 40 bp, Artificial Sequence
  sequence surrounding the exon-exon junction in a head-to-tail arrangement of bloodCirc_00725
aacttaagaaccagattcgaacaaatttacatgtattgga

SEQ ID NO: 7 - DNA, 40 bp, Artificial Sequence
  sequence surrounding the exon-exon junction in a head-to-tail arrangement of bloodCirc_17120
aagagtttatggaactacagaaagtgactgagaccgaaga

SEQ ID NO: 8 - DNA, 40 bp, Artificial Sequence
  sequence surrounding the exon-exon junction in a head-to-tail arrangement of bloodCirc_00155
acaacataacataaagattggtgattttcgatacacacca

SEQ ID NO: 9 - DNA, 40 bp, Artificial Sequence
  sequence surrounding the exon-exon junction in a head-to-tail arrangement of bloodCirc_18778
aattggcattctggatacagggattgagtgttgctatagt

SEQ ID NO: 10 - DNA, 40 bp, Artificial Sequence
  sequence surrounding the exon-exon junction in a head-to-tail arrangement of bloodCirc_09544
gctttggagcagtgtatttttagtttatgccaacgtgact

SEQ ID NO: 11 - DNA, 40 bp, Artificial Sequence
  sequence surrounding the exon-exon junction in a head-to-tail arrangement of bloodCirc_15325
ttctgaacatcctttgttaggtttatcaggtagaagatgt

SEQ ID NO: 12 - DNA, 40 bp, Artificial Sequence
  sequence surrounding the exon-exon junction in a head-to-tail arrangement of bloodCirc_06048
cccctctgcttctcaccccggaaacatttctttgattgtc

SEQ ID NO: 13 - DNA, 40 bp, Artificial Sequence
  sequence surrounding the exon-exon junction in a head-to-tail arrangement of bloodCirc_17070
cgataaaaaatgaagcagagtggctagatgattgtaagag

SEQ ID NO: 14 - DNA, 40 bp, Artificial Sequence
  sequence surrounding the exon-exon junction in a head-to-tail arrangement of bloodCirc_05238
ccattggcttctcatggatggcatccaaacaattgactct

SEQ ID NO: 15 - DNA, 40 bp, Artificial Sequence
  sequence surrounding the exon-exon junction in a head-to-tail arrangement of bloodCirc_17655
gtagctccaaggaggttaagaatgaagatgataaccgagc

SEQ ID NO: 16 - DNA, 40 bp, Artificial Sequence
  sequence surrounding the exon-exon junction in a head-to-tail arrangement of bloodCirc_01651
gggataacgcaacctctaagcaacatcatgacaacagaga

SEQ ID NO: 17 - DNA, 40 bp, Artificial Sequence
  sequence surrounding the exon-exon junction in a head-to-tail arrangement of bloodCirc_11479
gaccactgaaagtcaaagaatgaaggagaacgacctgctc

SEQ ID NO: 18 - DNA, 40 bp, Artificial Sequence
  sequence surrounding the exon-exon junction in a head-to-tail arrangement of bloodCirc_17787
ctcatgaaccacttggcaaaaccccaagactgcttctgag

SEQ ID NO: 19 - DNA, 40 bp, Artificial Sequence
  sequence surrounding the exon-exon junction in a head-to-tail arrangement of bloodCirc_20940
tgtccagctccagactgtggaacatccatgatagcagtct

SEQ ID NO: 20 - DNA, 40 bp, Artificial Sequence
  sequence surrounding the exon-exon junction in a head-to-tail arrangement of bloodCirc_10338
atcagggcatttgctgagagaaacatccgaaactgaaatc

SEQ ID NO: 21 - DNA, 40 bp, Artificial Sequence
  sequence surrounding the exon-exon junction in a head-to-tail arrangement of bloodCirc_14397
aaaatttatcacctaaagagccgtgtggttttgccatgtt

SEQ ID NO: 22 - DNA, 40 bp, Artificial Sequence
  sequence surrounding the exon-exon junction in a head-to-tail arrangement of bloodCirc_09432
tatccacgtgtgtaaggctggcagagctgcaaccctcttg

SEQ ID NO: 23 - DNA, 40 bp, Artificial Sequence
  sequence surrounding the exon-exon junction in a head-to-tail arrangement of bloodCirc_01741
cccaacaatgttatcattgagtctggtccatcgaactcat

SEQ ID NO: 24 - DNA, 40 bp, Artificial Sequence
  sequence surrounding the exon-exon junction in a head-to-tail arrangement of bloodCirc_15327
ttctgaacatcctttgttagtttatttaggaaagggaaac

SEQ ID NO: 25 - DNA, 40 bp, Artificial Sequence
  sequence surrounding the exon-exon junction in a head-to-tail arrangement of bloodCirc_01556
gagagactgagagaaaaacagaatgtgcggcaagaggaga

SEQ ID NO: 26 - DNA, 40 bp, Artificial Sequence
  sequence surrounding the exon-exon junction in a head-to-tail arrangement of bloodCirc_18274
gccgtgctggctcagagaagaatatcctccgaatcctaaa

SEQ ID NO: 27 - DNA, 40 bp, Artificial Sequence
  sequence surrounding the exon-exon junction in a head-to-tail arrangement of bloodCirc_20658
aaagagagactagagaagaggtaagaaagcaaacttaggt

SEQ ID NO: 28 - DNA, 40 bp, Artificial Sequence
  sequence surrounding the exon-exon junction in a head-to-tail arrangement of bloodCirc_20552
ctttgatgagatgcttccaggaccttaaagaagccaactt

SEQ ID NO: 29 - DNA, 40 bp, Artificial Sequence
  sequence surrounding the exon-exon junction in a head-to-tail arrangement of bloodCirc_03293
aagaactctacaatagtcaagtaagaattctctacgcctg

SEQ ID NO: 30 - DNA, 40 bp, Artificial Sequence
  sequence surrounding the exon-exon junction in a head-to-tail arrangement of bloodCirc_22764
tcatccaccacattacttaggttgcacagagcattgagga

SEQ ID NO: 31 - DNA, 40 bp, Artificial Sequence
  sequence surrounding the exon-exon junction in a head-to-tail arrangement of bloodCirc_15662
ataaaggcagctttgaaacactcctaaaagacgacggcct

SEQ ID NO: 32 - DNA, 40 bp, Artificial Sequence
  sequence surrounding the exon-exon junction in a head-to-tail arrangement of bloodCirc_04222
aatggagcattcatgcccaaagattgaaaccaacaaatcc

SEQ ID NO: 33 - DNA, 40 bp, Artificial Sequence
  sequence surrounding the exon-exon junction in a head-to-tail arrangement of bloodCirc_08121
atacctttctaacagcccaagactgtgaattggagaatca

SEQ ID NO: 34 - DNA, 40 bp, Artificial Sequence
  sequence surrounding the exon-exon junction in a head-to-tail arrangement of bloodCirc_13514
attattttaagaaaccacagctgtataactttcttcgatt

SEQ ID NO: 35 - DNA, 40 bp, Artificial Sequence
  sequence surrounding the exon-exon junction in a head-to-tail arrangement of bloodCirc_22065
agctgcttctgtatcttaaggaagttctacagactttgac

SEQ ID NO: 36 - DNA, 40 bp, Artificial Sequence
  sequence surrounding the exon-exon junction in a head-to-tail arrangement of bloodCirc_21136
aaatgaccatgtacaatggggatgccggaccagatctctg

SEQ ID NO: 37 - DNA, 40 bp, Artificial Sequence
  sequence surrounding the exon-exon junction in a head-to-tail arrangement of bloodCirc_07290
aagctaagcaaaatgatcagcattcaagaaaaagatgaga

SEQ ID NO: 38 - DNA, 40 bp, Artificial Sequence
  sequence surrounding the exon-exon junction in a head-to-tail arrangement of bloodCirc_21493
gcagccaattatacagtgtgggacagagcagaatgggctg

SEQ ID NO: 39 - DNA, 40 bp, Artificial Sequence
  sequence surrounding the exon-exon junction in a head-to-tail arrangement of bloodCirc_02565
tacttaagcgccacgagaagagtaaaaagcgacaatatga

SEQ ID NO: 40 - DNA, 40 bp, Artificial Sequence
  sequence surrounding the exon-exon junction in a head-to-tail arrangement of bloodCirc_13738
aagttcctacctgtgaagaagttattgaggtggtgatccg

SEQ ID NO: 41 - DNA, 40 bp, Artificial Sequence
  sequence surrounding the exon-exon junction in a head-to-tail arrangement of bloodCirc_09181
ggctccttttaactggatatactgtagtcagcttttaacc

SEQ ID NO: 42 - DNA, 40 bp, Artificial Sequence
  sequence surrounding the exon-exon junction in a head-to-tail arrangement of bloodCirc_10581
attaaagttttagaagatcggtatttgacctgtccaaaga

SEQ ID NO: 43 - DNA, 40 bp, Artificial Sequence
  sequence surrounding the exon-exon junction in a head-to-tail arrangement of bloodCirc_16418
gattccagcagtatcctcaagtgttgacagctcttctacc

SEQ ID NO: 44 - DNA, 40 bp, Artificial Sequence
  sequence surrounding the exon-exon junction in a head-to-tail arrangement of bloodCirc_00480
tattggaagggtacatctaggcaacagaacattgaggaaa

SEQ ID NO: 45 - DNA, 40 bp, Artificial Sequence
  sequence surrounding the exon-exon junction in a head-to-tail arrangement of bloodCirc_07128
aaagcggaagcaaattccagagagcacgttttcaatatca

SEQ ID NO: 46 - DNA, 40 bp, Artificial Sequence
  sequence surrounding the exon-exon junction in a head-to-tail arrangement of bloodCirc_09687
aggaagtaagccaagagaagatgaccgtggaaaaagtaca

SEQ ID NO: 47 - DNA, 40 bp, Artificial Sequence
  sequence surrounding the exon-exon junction in a head-to-tail arrangement of bloodCirc_04374
caccatggtgtctgtttgaggttgtccaggtgagccaggc

SEQ ID NO: 48 - DNA, 40 bp, Artificial Sequence
  sequence surrounding the exon-exon junction in a head-to-tail arrangement of bloodCirc_11059
aggaagaagacaaagaccagctgaaccttcacctagcccc

SEQ ID NO: 49 - DNA, 40 bp, Artificial Sequence
  sequence surrounding the exon-exon junction in a head-to-tail arrangement of bloodCirc_21189
tgcccgaggagagttaacaggtactaactgacttgtccat

SEQ ID NO: 50 - DNA, 40 bp, Artificial Sequence
  sequence surrounding the exon-exon junction in a head-to-tail arrangement of bloodCirc_20250
agatagtcttcttattgctgattataacaatgaaatggaa

SEQ ID NO: 51 - DNA, 40 bp, Artificial Sequence
  sequence surrounding the exon-exon junction in a head-to-tail arrangement of bloodCirc_20208
ttgaatggcacctgcagaagcttttcatgcaacacccaac

SEQ ID NO: 52 - DNA, 40 bp, Artificial Sequence
  sequence surrounding the exon-exon junction in a head-to-tail arrangement of bloodCirc_02272
ttgcaggctctttctaattggattttaaaatacccagtaa

SEQ ID NO: 53 - DNA, 40 bp, Artificial Sequence
  sequence surrounding the exon-exon junction in a head-to-tail arrangement of bloodCirc_00711
cactggggcacagactccagatctcacattcttgaaggtg

SEQ ID NO: 54 - DNA, 40 bp, Artificial Sequence
  sequence surrounding the exon-exon junction in a head-to-tail arrangement of bloodCirc_19568
gagatcacctttttgataaggagaatattaaacgtaaaga

SEQ ID NO: 55 - DNA, 40 bp, Artificial Sequence
  sequence surrounding the exon-exon junction in a head-to-tail arrangement of bloodCirc_01141
cttttctaagtttgagaaagctcccaatatggaacatgta

SEQ ID NO: 56 - DNA, 40 bp, Artificial Sequence
  sequence surrounding the exon-exon junction in a head-to-tail arrangement of bloodCirc_02693
gatcgcttcagaagacctaggtggatggagagagaaagaa

SEQ ID NO: 57 - DNA, 40 bp, Artificial Sequence
  sequence surrounding the exon-exon junction in a head-to-tail arrangement of bloodCirc_14089
gggaagccaagcagatacaacaccagcagacgtttttgaa

SEQ ID NO: 58 - DNA, 40 bp, Artificial Sequence
  sequence surrounding the exon-exon junction in a head-to-tail arrangement of bloodCirc_08653
ctgtgacaggtggggaagaggaaaaggaccagggaaaagg

SEQ ID NO: 59 - DNA, 40 bp, Artificial Sequence
  sequence surrounding the exon-exon junction in a head-to-tail arrangement of bloodCirc_04712
aaagagcgtgccgaacgaagattcttctgtgtgactcttg

SEQ ID NO: 60 - DNA, 40 bp, Artificial Sequence
  sequence surrounding the exon-exon junction in a head-to-tail arrangement of bloodCirc_06433
accatgggaagagcactcaggaagaaaaactaaaccacca

SEQ ID NO: 61 - DNA, 40 bp, Artificial Sequence
  sequence surrounding the exon-exon junction in a head-to-tail arrangement of bloodCirc_04231
agccaagcaccaacaccatggtacaactggatttggaaca

SEQ ID NO: 62 - DNA, 40 bp, Artificial Sequence
  sequence surrounding the exon-exon junction in a head-to-tail arrangement of bloodCirc_15257
ttcaaaaagataaagaaaagttatgagttgcagaaacgaa

SEQ ID NO: 63 - DNA, 40 bp, Artificial Sequence
  sequence surrounding the exon-exon junction in a head-to-tail arrangement of bloodCirc_08264
agaaagtcaagtctgaaaagcaatgatgttgtccactggg

SEQ ID NO: 64 - DNA, 40 bp, Artificial Sequence
  sequence surrounding the exon-exon junction in a head-to-tail arrangement of bloodCirc_19854
gctgacggacaacaacctcgaaagcactccaaagacctcc

SEQ ID NO: 65 - DNA, 40 bp, Artificial Sequence
  sequence surrounding the exon-exon junction in a head-to-tail arrangement of bloodCirc_17166
tagaaaaagaaattcaagaggaaatctcattggaattgga

SEQ ID NO: 66 - DNA, 40 bp, Artificial Sequence
  sequence surrounding the exon-exon junction in a head-to-tail arrangement of bloodCirc_04708
aggaaatgtataagctacagaaaagaacgcttggtgtatg

SEQ ID NO: 67 - DNA, 40 bp, Artificial Sequence
  sequence surrounding the exon-exon junction in a head-to-tail arrangement of bloodCirc_06000
tttcttttgattctaccacaattttcacccgatggaagac

SEQ ID NO: 68 - DNA, 40 bp, Artificial Sequence
  sequence surrounding the exon-exon junction in a head-to-tail arrangement of bloodCirc_19065
caatcagtgctccacacatgaaaatggaatcatcaagaca

SEQ ID NO: 69 - DNA, 40 bp, Artificial Sequence
  sequence surrounding the exon-exon junction in a head-to-tail arrangement of bloodCirc_01612
gtatggactacctccttttgattgtgaaaactgctgagag

SEQ ID NO: 70 - DNA, 40 bp, Artificial Sequence
  sequence surrounding the exon-exon junction in a head-to-tail arrangement of bloodCirc_07213
acttcaagatatttaccatggagatgatttttctttgatt

SEQ ID NO: 71 - DNA, 40 bp, Artificial Sequence
  sequence surrounding the exon-exon junction in a head-to-tail arrangement of bloodCirc_02010
agttgaagctgttgatagtgtggtattcatgggtagtttg

SEQ ID NO: 72 - DNA, 40 bp, Artificial Sequence
  sequence surrounding the exon-exon junction in a head-to-tail arrangement of bloodCirc_10749
ccttttgctaacaaaaacaggtatgtgatagtggaatgtg

SEQ ID NO: 73 - DNA, 40 bp, Artificial Sequence
  sequence surrounding the exon-exon junction in a head-to-tail arrangement of bloodCirc_12347
tggagacatagaatttcaggaaatctatcaaatgtggaag

SEQ ID NO: 74 - DNA, 40 bp, Artificial Sequence
  sequence surrounding the exon-exon junction in a head-to-tail arrangement of bloodCirc_10987
tgatgatgaaagttacacagagtaaagacaagattgcatc

SEQ ID NO: 75 - DNA, 40 bp, Artificial Sequence
  sequence surrounding the exon-exon junction in a head-to-tail arrangement of bloodCirc_01864
agccatgcaggccccaacagttgtgattccaaagaatccc

SEQ ID NO: 76 - DNA, 40 bp, Artificial Sequence
  sequence surrounding the exon-exon junction in a head-to-tail arrangement of bloodCirc_20724
aggccaaccaacctttggagagtgaagagagaacctgaca

SEQ ID NO: 77 - DNA, 40 bp, Artificial Sequence
  sequence surrounding the exon-exon junction in a head-to-tail arrangement of bloodCirc_22400
cagaagactggactgaagataactggcatcaaatactcac

SEQ ID NO: 78 - DNA, 40 bp, Artificial Sequence
  sequence surrounding the exon-exon junction in a head-to-tail arrangement of bloodCirc_02152
acaacaaaagacaatgatgatcatttgatccttcaaaaat

SEQ ID NO: 79 - DNA, 40 bp, Artificial Sequence
  sequence surrounding the exon-exon junction in a head-to-tail arrangement of bloodCirc_16992
agacaaattgacttacaaagggaacagagttcagaggcag

SEQ ID NO: 80 - DNA, 40 bp, Artificial Sequence
  sequence surrounding the exon-exon junction in a head-to-tail arrangement of bloodCirc_04329
tcagtgttcactggcaggaggcggtctatgcttgcttggt

SEQ ID NO: 81 - DNA, 40 bp, Artificial Sequence
  sequence surrounding the exon-exon junction in a head-to-tail arrangement of bloodCirc_10286
gagcaactttactttagtgggagggagatactgagagtga

SEQ ID NO: 82 - DNA, 40 bp, Artificial Sequence
  sequence surrounding the exon-exon junction in a head-to-tail arrangement of bloodCirc_13162
agtcaaaggaagcaaaagaagacctgatattgaatagaag

SEQ ID NO: 83 - DNA, 40 bp, Artificial Sequence
  sequence surrounding the exon-exon junction in a head-to-tail arrangement of bloodCirc_01070
tcaacatgattgcatttgaactcattgctatggacagtgc

SEQ ID NO: 84 - DNA, 40 bp, Artificial Sequence
  sequence surrounding the exon-exon junction in a head-to-tail arrangement of bloodCirc_11293
cttcattctggacgaggctggtagacgaagagcggcggag

SEQ ID NO: 85 - DNA, 40 bp, Artificial Sequence
  sequence surrounding the exon-exon junction in a head-to-tail arrangement of bloodCirc_02313
tggcccaggaacagcttatgttcacagaagaaaagcttgg

SEQ ID NO: 86 - DNA, 40 bp, Artificial Sequence
  sequence surrounding the exon-exon junction in a head-to-tail arrangement of bloodCirc_11596
gaaaacgtgagaaacataagagaagatggcgaattagaag

SEQ ID NO: 87 - DNA, 40 bp, Artificial Sequence
  sequence surrounding the exon-exon junction in a head-to-tail arrangement of bloodCirc_15955
cagaagggatgagattgaaggtgttgtctggaggatggag

SEQ ID NO: 88 - DNA, 40 bp, Artificial Sequence
  sequence surrounding the exon-exon junction in a head-to-tail arrangement of bloodCirc_07534
atttggcatcacaagtagaggcactaaagaaacaagaagc

SEQ ID NO: 89 - DNA, 40 bp, Artificial Sequence
  sequence surrounding the exon-exon junction in a head-to-tail arrangement of bloodCirc_00616
tcctacagcatcactatcaggagtctgtaacagactatac

SEQ ID NO: 90 - DNA, 40 bp, Artificial Sequence
  sequence surrounding the exon-exon junction in a head-to-tail arrangement of bloodCirc_01909
ctgtaccacctccttccaagccttccttgaatccagaagc

SEQ ID NO: 91 - DNA, 40 bp, Artificial Sequence
  sequence surrounding the exon-exon junction in a head-to-tail arrangement of bloodCirc_04787
ggtagcaagtacatggggagacttaattcagtgcacaaat

SEQ ID NO: 92 - DNA, 40 bp, Artificial Sequence
  sequence surrounding the exon-exon junction in a head-to-tail arrangement of bloodCirc_11447
cacacaccatcatggtcctgggatacctcagacaatggca

SEQ ID NO: 93 - DNA, 40 bp, Artificial Sequence
  sequence surrounding the exon-exon junction in a head-to-tail arrangement of bloodCirc_16169
aaactaaaggaactaggcaggaatatcttatcaaattagg

SEQ ID NO: 94 - DNA, 40 bp, Artificial Sequence
  sequence surrounding the exon-exon junction in a head-to-tail arrangement of bloodCirc_09079
atgccatttctcctgttcaggagtgtttctcaggagctat

SEQ ID NO: 95 - DNA, 40 bp, Artificial Sequence
  sequence surrounding the exon-exon junction in a head-to-tail arrangement of bloodCirc_00804
gagctgacattaactgtcagggaagaagacaaaaatatat

SEQ ID NO: 96 - DNA, 40 bp, Artificial Sequence
  sequence surrounding the exon-exon junction in a head-to-tail arrangement of bloodCirc_13521
tgatgaggagacagaaaaagtgtctgaatcaatggaatta

SEQ ID NO: 97 - DNA, 40 bp, Artificial Sequence
  sequence surrounding the exon-exon junction in a head-to-tail arrangement of bloodCirc_02559
ccacacggtgtgttctttcgatgttacatcctgtccactg

SEQ ID NO: 98 - DNA, 40 bp, Artificial Sequence
  sequence surrounding the exon-exon junction in a head-to-tail arrangement of bloodCirc_06318
gaggcacatctcaaaaacagaaaaacacaccttgacttta

SEQ ID NO: 99 - DNA, 40 bp, Artificial Sequence
  sequence surrounding the exon-exon junction in a head-to-tail arrangement of bloodCirc_11563
gaactggtgatattattaagctggaaacattgcccaaaga

SEQ ID NO: 100 - DNA, 40 bp, Artificial Sequence
  sequence surrounding the exon-exon junction in a head-to-tail arrangement of bloodCirc_02763
cttcctcaatgcttgtgtggcttcctgcctgacacagctc

SEQ ID NO: 101 - DNA, 40 bp, Artificial Sequence
  sequence surrounding the exon-exon junction in a head-to-tail arrangement of bloodCirc_10253
tggggcaggatggacggcaatctctggcgaacatagacga

SEQ ID NO: 102 - DNA, 40 bp, Artificial Sequence
  sequence surrounding the exon-exon junction in a head-to-tail arrangement of bloodCirc_14888
attgctgggattttgaggaggtattaatctctggagaaga

SEQ ID NO: 103 - DNA, 40 bp, Artificial Sequence
  sequence surrounding the exon-exon junction in a head-to-tail arrangement of bloodCirc_00354
gggccgtggccgaggcagagcattcctgggagatggtcgg

SEQ ID NO: 104 - DNA, 40 bp, Artificial Sequence
  sequence surrounding the exon-exon junction in a head-to-tail arrangement of bloodCirc_22404
tggtgcagatgagggaactggatttggacgtggcagaggg

SEQ ID NO: 105 - DNA, 40 bp, Artificial Sequence
  sequence surrounding the exon-exon junction in a head-to-tail arrangement of bloodCirc_05176
tggatttatttatttttcagagtgctgccacctgtgccag

SEQ ID NO: 106 - DNA, 40 bp, Artificial Sequence
  sequence surrounding the exon-exon junction in a head-to-tail arrangement of bloodCirc_01113
gtgcttcggggacattccagtgagaaagatcagtctaaag

SEQ ID NO: 107 - DNA, 40 bp, Artificial Sequence
  sequence surrounding the exon-exon junction in a head-to-tail arrangement of bloodCirc_13008
aggcggaagaaaatccatgtgaaaaagaacactgagagcc

SEQ ID NO: 108 - DNA, 40 bp, Artificial Sequence
  sequence surrounding the exon-exon junction in a head-to-tail arrangement of bloodCirc_16696
ttttgccagagtcagaagagattactattttggatgcaaa

SEQ ID NO: 109 - DNA, 40 bp, Artificial Sequence
  sequence surrounding the exon-exon junction in a head-to-tail arrangement of bloodCirc_17750
cttctctggaagatcttgtggttaaaaacgacaaccaaca

SEQ ID NO: 110 - DNA, 40 bp, Artificial Sequence
  sequence surrounding the exon-exon junction in a head-to-tail arrangement of bloodCirc_19832
attcttcatctaaagataagcgaatacaagctagcattct

SEQ ID NO: 111 - DNA, 40 bp, Artificial Sequence
  sequence surrounding the exon-exon junction in a head-to-tail arrangement of bloodCirc_22387
ctcagtcctcagtcatcttgtcatccgtccttggctcagg

SEQ ID NO: 112 - DNA, 40 bp, Artificial Sequence
  sequence surrounding the exon-exon junction in a head-to-tail arrangement of bloodCirc_01075
aagaattcacaggaagatagaaataggaaggttgttgatt

SEQ ID NO: 113 - DNA, 40 bp, Artificial Sequence
  sequence surrounding the exon-exon junction in a head-to-tail arrangement of bloodCirc_22554
aaaacagtagaaaaaaatcggaaaaaaatccgtctctaaa

SEQ ID NO: 114 - DNA, 40 bp, Artificial Sequence
  sequence surrounding the exon-exon junction in a head-to-tail arrangement of bloodCirc_05081
tgataaagtttcgtgcacagccggggaaatgtctgatgag

SEQ ID NO: 115 - DNA, 40 bp, Artificial Sequence
  sequence surrounding the exon-exon junction in a head-to-tail arrangement of bloodCirc_07080
aaaggacagcctgatgccaaaacataaattattaggaaac

SEQ ID NO: 116 - DNA, 40 bp, Artificial Sequence
  sequence surrounding the exon-exon junction in a head-to-tail arrangement of bloodCirc_06866
accatcggggagacaagcaaatctgacaggatggcatctg

SEQ ID NO: 117 - DNA, 40 bp, Artificial Sequence
  sequence surrounding the exon-exon junction in a head-to-tail arrangement of bloodCirc_12525
attcatttattctcaccagggttcagccgtctgtatatct

SEQ ID NO: 118 - DNA, 40 bp, Artificial Sequence
  sequence surrounding the exon-exon junction in a head-to-tail arrangement of bloodCirc_12560
gttgccctgtgatgaagaaagatgttcacggaagaccagg

SEQ ID NO: 119 - DNA, 40 bp, Artificial Sequence
  sequence surrounding the exon-exon junction in a head-to-tail arrangement of bloodCirc_15719
gaaaaattggtgtacctcagagtgatgacagacctaatgc

SEQ ID NO: 120 - DNA, 40 bp, Artificial Sequence
  sequence surrounding the exon-exon junction in a head-to-tail arrangement of bloodCirc_00593
tttcacaagtgttaccaaaggtttgttctgagtaatgaat

SEQ ID NO: 121 - DNA, 40 bp, Artificial Sequence
  sequence surrounding the exon-exon junction in a head-to-tail arrangement of bloodCirc_07174
ttggagtctgatctttacagggaaagctatgaaaaaatgg

SEQ ID NO: 122 - DNA, 40 bp, Artificial Sequence
  sequence surrounding the exon-exon junction in a head-to-tail arrangement of bloodCirc_18626
cgaagtgattctcttataagatggaagatggtaccccaaa

SEQ ID NO: 123 - DNA, 40 bp, Artificial Sequence
  sequence surrounding the exon-exon junction in a head-to-tail arrangement of bloodCirc_19248
agccaaacaatcttttcaaggtcactctgtgagactgctg

SEQ ID NO: 124 - DNA, 40 bp, Artificial Sequence
  sequence surrounding the exon-exon junction in a head-to-tail arrangement of bloodCirc_04914
caacaatgtgggactatacggcaccatactggacatacct

SEQ ID NO: 125 - DNA, 40 bp, Artificial Sequence
  sequence surrounding the exon-exon junction in a head-to-tail arrangement of bloodCirc_04376
ctgttatgggcaaccctaaggagaagtctgccgttactgc

SEQ ID NO: 126 - DNA, 40 bp, Artificial Sequence
  sequence surrounding the exon-exon junction in a head-to-tail arrangement of bloodCirc_15734
gagttgtagccatgccctaggtcagatcacttaaagaagg

SEQ ID NO: 127 - DNA, 40 bp, Artificial Sequence
  sequence surrounding the exon-exon junction in a head-to-tail arrangement of bloodCirc_16067
agtgtgaggagaggttgaaggtatcttattgacagccggt

SEQ ID NO: 128 - DNA, 40 bp, Artificial Sequence
  sequence surrounding the exon-exon junction in a head-to-tail arrangement of bloodCirc_17988
ggccaaaagaaaaatcgcacacaaaaggatgccacggaga

SEQ ID NO: 129 - DNA, 40 bp, Artificial Sequence
  sequence surrounding the exon-exon junction in a head-to-tail arrangement of bloodCirc_00386
gagcaagagaataataaaaggctcccagccaacctctgat

SEQ ID NO: 130 - DNA, 40 bp, Artificial Sequence
  sequence surrounding the exon-exon junction in a head-to-tail arrangement of bloodCirc_20264
aacctttagatgaatttacaatgatgactttgaccagttt

SEQ ID NO: 131 - DNA, 40 bp, Artificial Sequence
  sequence surrounding the exon-exon junction in a head-to-tail arrangement of bloodCirc_20916
aatgcagccaactgttgaagaggtttgtatggtcagtgaa

SEQ ID NO: 132 - DNA, 40 bp, Artificial Sequence
  sequence surrounding the exon-exon junction in a head-to-tail arrangement of bloodCirc_02796
accaaaggcttcacctccagaggaattaaggaatttgcaa

SEQ ID NO: 133 - DNA, 40 bp, Artificial Sequence
  sequence surrounding the exon-exon junction in a head-to-tail arrangement of bloodCirc_20002
attgtaagaggtgacaacgtttatcaggaactgttgccgt

SEQ ID NO: 134 - DNA, 40 bp, Artificial Sequence
  sequence surrounding the exon-exon junction in a head-to-tail arrangement of bloodCirc_12270
ttgcattggcaatgagacagctccataatgggagaagtaa

SEQ ID NO: 135 - DNA, 40 bp, Artificial Sequence
  sequence surrounding the exon-exon junction in a head-to-tail arrangement of bloodCirc_23007
accgggtataggaggaagagagccatgggaccacaccacc

SEQ ID NO: 136 - DNA, 40 bp, Artificial Sequence
  sequence surrounding the exon-exon junction in a head-to-tail arrangement of bloodCirc_09230
atcaagcatgtggatttaaggtggtgtcccagcgaatcag

SEQ ID NO: 137 - DNA, 40 bp, Artificial Sequence
  sequence surrounding the exon-exon junction in a head-to-tail arrangement of bloodCirc_22401
cagaagactggactgaagatgatttggacgtggcagaggg

SEQ ID NO: 138 - DNA, 40 bp, Artificial Sequence
  sequence surrounding the exon-exon junction in a head-to-tail arrangement of bloodCirc_07006
attaggaacaatggtgcaagtgacttttttgaacgaacca

SEQ ID NO: 139 - DNA, 40 bp, Artificial Sequence
  sequence surrounding the exon-exon junction in a head-to-tail arrangement of bloodCirc_14241
gatgctcactttcgactgagtgttatagttttgccgctgg

SEQ ID NO: 140 - DNA, 40 bp, Artificial Sequence
  sequence surrounding the exon-exon junction in a head-to-tail arrangement of bloodCirc_16836
aaccctggatattctaacagattcagtgctcaagagtgaa

SEQ ID NO: 141 - DNA, 40 bp, Artificial Sequence
  sequence surrounding the exon-exon junction in a head-to-tail arrangement of bloodCirc_10887
gacctagagcccatcctaagaacaactctgctcatggtga

SEQ ID NO: 142 - DNA, 40 bp, Artificial Sequence
  sequence surrounding the exon-exon junction in a head-to-tail arrangement of bloodCirc_22986
gacccataatggacattaagaaacagcaaatggaagaccc

SEQ ID NO: 143 - DNA, 40 bp, Artificial Sequence
  sequence surrounding the exon-exon junction in a head-to-tail arrangement of bloodCirc_06929
gggggatggcacagaatggggcccggattgcatttctaca

SEQ ID NO: 144 - DNA, 40 bp, Artificial Sequence
  sequence surrounding the exon-exon junction in a head-to-tail arrangement of bloodCirc_07056
atctaaggacaaatcatcaggaaaacggacgatgtattac

SEQ ID NO: 145 - DNA, 40 bp, Artificial Sequence
  sequence surrounding the exon-exon junction in a head-to-tail arrangement of bloodCirc_19098
ttgagaagtttattcagaaattgtattccctgaatgacta

SEQ ID NO: 146 - DNA, 40 bp, Artificial Sequence
  sequence surrounding the exon-exon junction in a head-to-tail arrangement of bloodCirc_03734
catcaaatgtgcaaacagaaacagtgatgtgtgttctgaa

SEQ ID NO: 147 - DNA, 40 bp, Artificial Sequence
  sequence surrounding the exon-exon junction in a head-to-tail arrangement of bloodCirc_02126
aagccaatcaaaaagacaagtgatcaagttgttcctgcag

SEQ ID NO: 148 - DNA, 40 bp, Artificial Sequence
  sequence surrounding the exon-exon junction in a head-to-tail arrangement of bloodCirc_21287
gaatactggaaaacccacagccttcttagattcttcaacc

SEQ ID NO: 149 - DNA, 40 bp, Artificial Sequence
  sequence surrounding the exon-exon junction in a head-to-tail arrangement of bloodCirc_15062
gtacaaggaatttcagaacaaagcgattattggaagccat

SEQ ID NO: 150 - DNA, 40 bp, Artificial Sequence
  sequence surrounding the exon-exon junction in a head-to-tail arrangement of bloodCirc_20509
aacaactagaaaccaaacaggaggaacaggaattaagcct

SEQ ID NO: 151 - DNA, 40 bp, Artificial Sequence
  sequence surrounding the exon-exon junction in a head-to-tail arrangement of bloodCirc_10756
ccttttgctaacaaaaacagaacttttttagaaaatatgc

SEQ ID NO: 152 - DNA, 40 bp, Artificial Sequence
  sequence surrounding the exon-exon junction in a head-to-tail arrangement of bloodCirc_20561
ggccttcaacttccagccctattactgaatgagaaaatgt

SEQ ID NO: 153 - DNA, 40 bp, Artificial Sequence
  sequence surrounding the exon-exon junction in a head-to-tail arrangement of bloodCirc_08654
caaaagataagaaagagaaggaaaaggaccagggaaaagg

SEQ ID NO: 154 - DNA, 40 bp, Artificial Sequence
  sequence surrounding the exon-exon junction in a head-to-tail arrangement of bloodCirc_08778
cggacctggccttgctgcagcctgtgcacgtcgggcgtag

SEQ ID NO: 155 - DNA, 40 bp, Artificial Sequence
  sequence surrounding the exon-exon junction in a head-to-tail arrangement of bloodCirc_02929
ttgatgatcaagatttccagatcaatgaactgagccatgt

SEQ ID NO: 156 - DNA, 40 bp, Artificial Sequence
  sequence surrounding the exon-exon junction in a head-to-tail arrangement of bloodCirc_17110
aaaggaatgacttctctccaattttcagctgaactctcat

SEQ ID NO: 157 - DNA, 40 bp, Artificial Sequence
  sequence surrounding the exon-exon junction in a head-to-tail arrangement of bloodCirc_09420
aacactctgaaagacggaaggccatcatgcagaaggggga

SEQ ID NO: 158 - DNA, 40 bp, Artificial Sequence
  sequence surrounding the exon-exon junction in a head-to-tail arrangement of bloodCirc_04015
tcctgcagcaacagatccagattcctcctgcatggaaaaa

SEQ ID NO: 159 - DNA, 40 bp, Artificial Sequence
  sequence surrounding the exon-exon junction in a head-to-tail arrangement of bloodCirc_21439
ttggagtagcctctcgggagatcattcgcaaggtggttcg

SEQ ID NO: 160 - DNA, 40 bp, Artificial Sequence
  sequence surrounding the exon-exon junction in a head-to-tail arrangement of bloodCirc_19011
ctgaaaactgctgagagaagggcagccattctacaaaagt

SEQ ID NO: 161 - DNA, 40 bp, Artificial Sequence
  sequence surrounding the exon-exon junction in a head-to-tail arrangement of bloodCirc_08356
agaatctcaataacagtatgttatttctcaaactctgagg

SEQ ID NO: 162 - DNA, 40 bp, Artificial Sequence
  sequence surrounding the exon-exon junction in a head-to-tail arrangement of bloodCirc_09604
tgtgtgcattagtacaaatgagttgaaactgtgggacagc

SEQ ID NO: 163 - DNA, 40 bp, Artificial Sequence
  sequence surrounding the exon-exon junction in a head-to-tail arrangement of bloodCirc_13634
agcatgaacgaaacaagaaagtgagccctattcccagagg

SEQ ID NO: 164 - DNA, 40 bp, Artificial Sequence
  sequence surrounding the exon-exon junction in a head-to-tail arrangement of bloodCirc_20447
atgaaaaggaactttataagggtcttactgaagtaacaca

SEQ ID NO: 165 - DNA, 40 bp, Artificial Sequence
  sequence surrounding the exon-exon junction in a head-to-tail arrangement of bloodCirc_09322
acaggcggaggagcccagaggcatgagccatgagcccaag

SEQ ID NO: 166 - DNA, 40 bp, Artificial Sequence
  sequence surrounding the exon-exon junction in a head-to-tail arrangement of bloodCirc_20382
aaagatgaaaagaaacttctgtaataatagacgtggatgg

SEQ ID NO: 167 - DNA, 40 bp, Artificial Sequence
  sequence surrounding the exon-exon junction in a head-to-tail arrangement of bloodCirc_01675
tttatgaatgtgttgtggagcctgctcaggaagaactcag

SEQ ID NO: 168 - DNA, 40 bp, Artificial Sequence
  sequence surrounding the exon-exon junction in a head-to-tail arrangement of bloodCirc_01264
tcaggctgaagctcaagaagtataacagaagatgaagcaa

SEQ ID NO: 169 - DNA, 40 bp, Artificial Sequence
  sequence surrounding the exon-exon junction in a head-to-tail arrangement of bloodCirc_09473
tttccagtctgctggccaaggggcctttacaacaactaaa

SEQ ID NO: 170 - DNA, 40 bp, Artificial Sequence
  sequence surrounding the exon-exon junction in a head-to-tail arrangement of bloodCirc_04559
tcctgctggagccacccaagtggttaaatgaggagaaaat

SEQ ID NO: 171 - DNA, 40 bp, Artificial Sequence
  sequence surrounding the exon-exon junction in a head-to-tail arrangement of bloodCirc_19673
aatgtttaacccatttagaggaaagaatacccacctcatg

SEQ ID NO: 172 - DNA, 40 bp, Artificial Sequence
  sequence surrounding the exon-exon junction in a head-to-tail arrangement of bloodCirc_15335
tcaccagttaatagcaccagatcaacctctccacttctcc

SEQ ID NO: 173 - DNA, 40 bp, Artificial Sequence
  sequence surrounding the exon-exon junction in a head-to-tail arrangement of bloodCirc_14366
acaccacctgtgatctcaagctctgcttatgataatgtca

SEQ ID NO: 174 - DNA, 40 bp, Artificial Sequence
  sequence surrounding the exon-exon junction in a head-to-tail arrangement of bloodCirc_01252
cggtagcaccttaaataaagtgaaagccctgtgtaaggaa

SEQ ID NO: 175 - DNA, 40 bp, Artificial Sequence
  sequence surrounding the exon-exon junction in a head-to-tail arrangement of bloodCirc_22466
cctgcacgcaacagaagaagagtgaagatagtccaagtcc

SEQ ID NO: 176 - DNA, 40 bp, Artificial Sequence
  sequence surrounding the exon-exon junction in a head-to-tail arrangement of bloodCirc_01676
gggataacgcaacctctaagcctgctcaggaagaactcag

SEQ ID NO: 177 - DNA, 40 bp, Artificial Sequence
  sequence surrounding the exon-exon junction in a head-to-tail arrangement of bloodCirc_05433
tatcttcccatcataaaaaagatcaactcactatcctgaa

SEQ ID NO: 178 - DNA, 40 bp, Artificial Sequence
  sequence surrounding the exon-exon junction in a head-to-tail arrangement of bloodCirc_16984
gatatcctgaaagatcaatgacgagcaaaaatcaaattaa

SEQ ID NO: 179 - DNA, 40 bp, Artificial Sequence
  sequence surrounding the exon-exon junction in a head-to-tail arrangement of bloodCirc_18946
caaacaaaaaaatgttgaagccaaatttgtatcctactgt

SEQ ID NO: 180 - DNA, 40 bp, Artificial Sequence
  sequence surrounding the exon-exon junction in a head-to-tail arrangement of bloodCirc_22377
cctcgagcacgtcacacacactccaaagacaacaggccct

SEQ ID NO: 181 - DNA, 40 bp, Artificial Sequence
  sequence surrounding the exon-exon junction in a head-to-tail arrangement of bloodCirc_15300
tattcttctccttgctgttggaagttggtgaaccatctaa

SEQ ID NO: 182 - DNA, 40 bp, Artificial Sequence
  sequence surrounding the exon-exon junction in a head-to-tail arrangement of bloodCirc_08660
gagacacttcagtaatgcaggccaaattaaagaagcggaa

SEQ ID NO: 183 - DNA, 40 bp, Artificial Sequence
  sequence surrounding the exon-exon junction in a head-to-tail arrangement of bloodCirc_01562
gcaaccatagccttcctaattgacctgaaaaaaatgtctg

SEQ ID NO: 184 - DNA, 40 bp, Artificial Sequence
  sequence surrounding the exon-exon junction in a head-to-tail arrangement of bloodCirc_09996
gattcagtcaaactaagcagtgcagcgtaagtatgcacag

SEQ ID NO: 185 - DNA, 40 bp, Artificial Sequence
  sequence surrounding the exon-exon junction in a head-to-tail arrangement of bloodCirc_10763
cctcctggctcttggctgtgttgttgaaatctataccagt

SEQ ID NO: 186 - DNA, 40 bp, Artificial Sequence
  sequence surrounding the exon-exon junction in a head-to-tail arrangement of bloodCirc_05073
tagatgccttacagttagagaatctttggatttgtttaat

SEQ ID NO: 187 - DNA, 40 bp, Artificial Sequence
  sequence surrounding the exon-exon junction in a head-to-tail arrangement of bloodCirc_20330
atcctgttgttgttgtttcaagagaatttcccaagagatt

SEQ ID NO: 188 - DNA, 40 bp, Artificial Sequence
  sequence surrounding the exon-exon junction in a head-to-tail arrangement of bloodCirc_01568
tggaggttatgttgctaaaggattaatgcagtatcgaatg

SEQ ID NO: 189 - DNA, 40 bp, Artificial Sequence
  sequence surrounding the exon-exon junction in a head-to-tail arrangement of bloodCirc_04367
gcaaagaattcaccccaccagtgaaggctcatggcaagaa

SEQ ID NO: 190 - DNA, 40 bp, Artificial Sequence
  sequence surrounding the exon-exon junction in a head-to-tail arrangement of bloodCirc_21442
actttatgaaacactccaaggggaatgagtttcagaatat

SEQ ID NO: 191 - DNA, 40 bp, Artificial Sequence
  sequence surrounding the exon-exon junction in a head-to-tail arrangement of bloodCirc_15809
agaattttaagatacttcagaattatttgtcaaagagaat

SEQ ID NO: 192 - DNA, 40 bp, Artificial Sequence
  sequence surrounding the exon-exon junction in a head-to-tail arrangement of bloodCirc_08775
atgtcaaatttgtttgtcagcattccatggactttttgct

SEQ ID NO: 193 - DNA, 40 bp, Artificial Sequence
  sequence surrounding the exon-exon junction in a head-to-tail arrangement of bloodCirc_01596
ccttatctacttcagaacagctgctcagataaagaatttg

SEQ ID NO: 194 - DNA, 40 bp, Artificial Sequence
  sequence surrounding the exon-exon junction in a head-to-tail arrangement of bloodCirc_15618
ctcagatatggtcttaaaagggtaaactggtccatgctaa

SEQ ID NO: 195 - DNA, 40 bp, Artificial Sequence
  sequence surrounding the exon-exon junction in a head-to-tail arrangement of bloodCirc_04371
tggatcctgagaacttcaggctcttgggcaatgtgctggt

SEQ ID NO: 196 - DNA, 40 bp, Artificial Sequence
  sequence surrounding the exon-exon junction in a head-to-tail arrangement of bloodCirc_17540
ctgaccttttaaaaggaaagccgatttattttgcatattc

SEQ ID NO: 197 - DNA, 40 bp, Artificial Sequence
  sequence surrounding the exon-exon junction in a head-to-tail arrangement of bloodCirc_02864
ttactcacagtataaaaccagtggttggttctagctattg

SEQ ID NO: 198 - DNA, 40 bp, Artificial Sequence
  sequence surrounding the exon-exon junction in a head-to-tail arrangement of bloodCirc_11369
gattccgaagcgtcgcacagaagcctgccctggactgctc

SEQ ID NO: 199 - DNA, 40 bp, Artificial Sequence
  sequence surrounding the exon-exon junction in a head-to-tail arrangement of bloodCirc_19205
accaattataagtagttcaggaaatggaagttccagtatt

SEQ ID NO: 200 - DNA, 40 bp, Artificial Sequence
  sequence surrounding the exon-exon junction in a head-to-tail arrangement of bloodCirc_17131
acctctgattccaccaccggaaacagcacttcttctcagt

SEQ ID NO: 201 - DNA, 40 bp, Artificial Sequence
  sequence surrounding the exon-exon junction in a head-to-tail arrangement of bloodCirc_14060
aaccaacattcatcagcaagttccacttacttacatgatc

SEQ ID NO: 202 - DNA, 40 bp, Artificial Sequence
  sequence surrounding the exon-exon junction in a head-to-tail arrangement of bloodCirc_04999
aacaaatgtgagattgccagaaaaatatgcaggaaccaat

SEQ ID NO: 203 - DNA, 40 bp, Artificial Sequence
  sequence surrounding the exon-exon junction in a head-to-tail arrangement of bloodCirc_09815
atttgaggagaaagcatttgctatttcaagaagcccctga

SEQ ID NO: 204 - DNA, 40 bp, Artificial Sequence
  sequence surrounding the exon-exon junction in a head-to-tail arrangement of bloodCirc_07981
caattcttcagaaactccagattgctatgcagaaccaaat

SEQ ID NO: 205 - DNA, 40 bp, Artificial Sequence
  sequence surrounding the exon-exon junction in a head-to-tail arrangement of bloodCirc_17411
ctaggcttatcatagtaaaagaactacataagggagaatg

SEQ ID NO: 206 - DNA, 40 bp, Artificial Sequence
  sequence surrounding the exon-exon junction in a head-to-tail arrangement of bloodCirc_01550
ttgaggcacgagagcagaagtgggtgcctgatagacatcc

SEQ ID NO: 207 - DNA, 40 bp, Artificial Sequence
  sequence surrounding the exon-exon junction in a head-to-tail arrangement of bloodCirc_04237
atgaaagcaagtcactagagattttggaaccagtactagc

SEQ ID NO: 208 - DNA, 40 bp, Artificial Sequence
  sequence surrounding the exon-exon junction in a head-to-tail arrangement of bloodCirc_06459
tcttgacaaaactttagcaagtgcagattcactttatagg

SEQ ID NO: 209 - DNA, 40 bp, Artificial Sequence
  sequence surrounding the exon-exon junction in a head-to-tail arrangement of bloodCirc_22388
ctcagtcctcagtcatcttgcattgatctggtagccttgc

SEQ ID NO: 210 - DNA, 40 bp, Artificial Sequence
  sequence surrounding the exon-exon junction in a head-to-tail arrangement of bloodCirc_19582
agaatttatatccacagaaggaggaaacaccaattggaag

SEQ ID NO: 211 - DNA, 40 bp, Artificial Sequence
  sequence surrounding the exon-exon junction in a head-to-tail arrangement of bloodCirc_02407
taaagaagaaatctgaagaggaaaagaatgaaaagataag

SEQ ID NO: 212 - DNA, 40 bp, Artificial Sequence
  sequence surrounding the exon-exon junction in a head-to-tail arrangement of bloodCirc_23137
gaaactgagcctaatcagcagggatactgcatccaacctg

SEQ ID NO: 213 - DNA, 40 bp, Artificial Sequence
  sequence surrounding the exon-exon junction in a head-to-tail arrangement of bloodCirc_13589
agaaactttccctccttcagataagcatggattcctggtt

SEQ ID NO: 214 - DNA, 40 bp, Artificial Sequence
  sequence surrounding the exon-exon junction in a head-to-tail arrangement of bloodCirc_14585
atgaatctgcaaacaatcgagtgctagtcctatgggagta

SEQ ID NO: 215 - DNA, 40 bp, Artificial Sequence
  sequence surrounding the exon-exon junction in a head-to-tail arrangement of bloodCirc_02974
tagcaaattactaaaatcatatattaatatgatggatatc

SEQ ID NO: 216 - DNA, 40 bp, Artificial Sequence
  sequence surrounding the exon-exon junction in a head-to-tail arrangement of bloodCirc_13436
ttaaaaaccatctacgaaaggacacttaccgaagaaggca

SEQ ID NO: 217 - DNA, 40 bp, Artificial Sequence
  sequence surrounding the exon-exon junction in a head-to-tail arrangement of bloodCirc_12752
ggcttagaaacatagatgaggaatagacttcaagatcaaa

SEQ ID NO: 218 - DNA, 40 bp, Artificial Sequence
  sequence surrounding the exon-exon junction in a head-to-tail arrangement of bloodCirc_21087
ggactatcccagcagtcgaggtccaactggcccaccttca

SEQ ID NO: 219 - DNA, 40 bp, Artificial Sequence
  sequence surrounding the exon-exon junction in a head-to-tail arrangement of bloodCirc_02599
acaaggcttccaccagcaagtacgtagagaaatcgacact

SEQ ID NO: 220 - DNA, 40 bp, Artificial Sequence
  sequence surrounding the exon-exon junction in a head-to-tail arrangement of bloodCirc_02264
aattggaaatttttattcgggtgttcctccaagaaaagct

SEQ ID NO: 221 - DNA, 40 bp, Artificial Sequence
  sequence surrounding the exon-exon junction in a head-to-tail arrangement of bloodCirc_06099
ctgcacagctataagagaagtcagaaattggctttggaaa

SEQ ID NO: 222 - DNA, 40 bp, Artificial Sequence
  sequence surrounding the exon-exon junction in a head-to-tail arrangement of bloodCirc_03159
ctgctggaattattcatcggcttcttggtgaatttttgga

SEQ ID NO: 223 - DNA, 40 bp, Artificial Sequence
  sequence surrounding the exon-exon junction in a head-to-tail arrangement of bloodCirc_06939
ggcagacagcttttaagacagcccggattgcatttctaca

SEQ ID NO: 224 - DNA, 40 bp, Artificial Sequence
  sequence surrounding the exon-exon junction in a head-to-tail arrangement of bloodCirc_17748
gtgacaccaagataagtaacgatgacttgaaagtagggca

SEQ ID NO: 225 - DNA, 40 bp, Artificial Sequence
  sequence surrounding the exon-exon junction in a head-to-tail arrangement of bloodCirc_06781
atatccttacaggcagagagcacacgtcacatggagatgg

SEQ ID NO: 226 - DNA, 40 bp, Artificial Sequence
  sequence surrounding the exon-exon junction in a head-to-tail arrangement of bloodCirc_09698
cacagccattccatttcactgcaggatgtagccaatcaaa

SEQ ID NO: 227 - DNA, 40 bp, Artificial Sequence
  sequence surrounding the exon-exon junction in a head-to-tail arrangement of bloodCirc_12901
ttgaacagcaaaaattagatgatggcccgtactttggaac

SEQ ID NO: 228 - DNA, 40 bp, Artificial Sequence
  sequence surrounding the exon-exon junction in a head-to-tail arrangement of bloodCirc_11110
cgacaccttcttccttcgaggactctgaagacctactggg

SEQ ID NO: 229 - DNA, 40 bp, Artificial Sequence
  sequence surrounding the exon-exon junction in a head-to-tail arrangement of bloodCirc_15689
gcttggaaacaccaacttacccaacagaagctgttcttcc

SEQ ID NO: 230 - DNA, 40 bp, Artificial Sequence
  sequence surrounding the exon-exon junction in a head-to-tail arrangement of bloodCirc_00858
ctagggaaaacctaacccagattgagtgtagaaattgaca

SEQ ID NO: 231 - DNA, 40 bp, Artificial Sequence
  sequence surrounding the exon-exon junction in a head-to-tail arrangement of bloodCirc_10248
atgccattcatcaaagagggcctggatctaaaaaatcagc

SEQ ID NO: 232 - DNA, 40 bp, Artificial Sequence
  sequence surrounding the exon-exon junction in a head-to-tail arrangement of bloodCirc_16838
cacaatgtggattttttgaaattcagtgctcaagagtgaa

SEQ ID NO: 233 - DNA, 40 bp, Artificial Sequence
  sequence surrounding the exon-exon junction in a head-to-tail arrangement of bloodCirc_06571
agctcagcaattcttaccttgttttgacctgtagcagaga

SEQ ID NO: 234 - DNA, 40 bp, Artificial Sequence
  sequence surrounding the exon-exon junction in a head-to-tail arrangement of bloodCirc_01959
aacaagaagaggaacgtgagggaacacaacagtagatgag

SEQ ID NO: 235 - DNA, 40 bp, Artificial Sequence
  sequence surrounding the exon-exon junction in a head-to-tail arrangement of bloodCirc_05880
tagaagcacatggaaaaaaggctgagaattttttctcgtg

SEQ ID NO: 236 - DNA, 40 bp, Artificial Sequence
  sequence surrounding the exon-exon junction in a head-to-tail arrangement of bloodCirc_13163
agtcaaaggaagcaaaagaaggaaaaaggagaagccaaag

SEQ ID NO: 237 - DNA, 40 bp, Artificial Sequence
  sequence surrounding the exon-exon junction in a head-to-tail arrangement of bloodCirc_07836
aagcaagagatttctgaatggatgggaaggccattgtgac

SEQ ID NO: 238 - DNA, 40 bp, Artificial Sequence
  sequence surrounding the exon-exon junction in a head-to-tail arrangement of bloodCirc_19213
gaatagataacaagtgcagtcctcttgataggagtgggat

SEQ ID NO: 239 - DNA, 40 bp, Artificial Sequence
  sequence surrounding the exon-exon junction in a head-to-tail arrangement of bloodCirc_04007
tggaataacatacaaaccaggtacacctgagagcctggca

SEQ ID NO: 240 - DNA, 40 bp, Artificial Sequence
  sequence surrounding the exon-exon junction in a head-to-tail arrangement of bloodCirc_06028
aaattgctgttttacagaaggcttctcatcagttgaaatt

SEQ ID NO: 241 - DNA, 40 bp, Artificial Sequence
  sequence surrounding the exon-exon junction in a head-to-tail arrangement of bloodCirc_20626
aaaagccacaagttgaccaagaaggatgccaattctgcgc

SEQ ID NO: 242 - DNA, 40 bp, Artificial Sequence
  sequence surrounding the exon-exon junction in a head-to-tail arrangement of bloodCirc_10962
catccaatccaaaaaataaggaccttttttctatcagtgc

SEQ ID NO: 243 - DNA, 40 bp, Artificial Sequence
  sequence surrounding the exon-exon junction in a head-to-tail arrangement of bloodCirc_13660
ttggcagatttattgccatgataatgagcttcagtcccca

SEQ ID NO: 244 - DNA, 40 bp, Artificial Sequence
  sequence surrounding the exon-exon junction in a head-to-tail arrangement of bloodCirc_15338
gtcagtctgcagctactcagatcaacctctccacttctcc

SEQ ID NO: 245 - DNA, 40 bp, Artificial Sequence
  sequence surrounding the exon-exon junction in a head-to-tail arrangement of bloodCirc_07828
caaccccatctccagacaaattattaccccattcaagttg

SEQ ID NO: 246 - DNA, 40 bp, Artificial Sequence
  sequence surrounding the exon-exon junction in a head-to-tail arrangement of bloodCirc_17980
tctgatggaggaagatacagtcttcccaagggattgttga

SEQ ID NO: 247 - DNA, 40 bp, Artificial Sequence
  sequence surrounding the exon-exon junction in a head-to-tail arrangement of bloodCirc_14085
tcagagcttggagacagacggaagtgtttggattgtgagc

SEQ ID NO: 248 - DNA, 40 bp, Artificial Sequence
  sequence surrounding the exon-exon junction in a head-to-tail arrangement of bloodCirc_21017
gtgattttgaaagtaaaaagaattatagtgaacattattc

SEQ ID NO: 249 - DNA, 40 bp, Artificial Sequence
  sequence surrounding the exon-exon junction in a head-to-tail arrangement of bloodCirc_15597
tttctttctgtttttgcgaggtgaagcatccggttactgg

SEQ ID NO: 250 - DNA, 40 bp, Artificial Sequence
  sequence surrounding the exon-exon junction in a head-to-tail arrangement of bloodCirc_17066
gcaacctcaggcttcagccagctgtattcatcaccaaaga

SEQ ID NO: 251 - DNA, 40 bp, Artificial Sequence
  sequence surrounding the exon-exon junction in a head-to-tail arrangement of bloodCirc_10120
ccttaaggagaaagtttcagcactcctggaaaaagtcaga

SEQ ID NO: 252 - DNA, 40 bp, Artificial Sequence
  sequence surrounding the exon-exon junction in a head-to-tail arrangement of bloodCirc_13524
caatcccttgtccttaaaagtgtgggaattttgctgtcct

SEQ ID NO: 253 - DNA, 40 bp, Artificial Sequence
  sequence surrounding the exon-exon junction in a head-to-tail arrangement of bloodCirc_21766
tctttagacctaactcaaagagagacatctccccatacat

SEQ ID NO: 254 - DNA, 40 bp, Artificial Sequence
  sequence surrounding the exon-exon junction in a head-to-tail arrangement of bloodCirc_13231
tccaaggaaccagtgcgaagcaaagaatggctcaagaagt

SEQ ID NO: 255 - DNA, 40 bp, Artificial Sequence
  sequence surrounding the exon-exon junction in a head-to-tail arrangement of bloodCirc_14042
aggagaacaagcagttcaagtggaaggaggcaaaaccgga

SEQ ID NO: 256 - DNA, 40 bp, Artificial Sequence
  sequence surrounding the exon-exon junction in a head-to-tail arrangement of bloodCirc_16116
gcgtgcattatttctgtcttctggaagagcctgtattgtc

SEQ ID NO: 257 - DNA, 40 bp, Artificial Sequence
  sequence surrounding the exon-exon junction in a head-to-tail arrangement of bloodCirc_21279
ctccttcattttcacctctggcagacaccacccatccttt

SEQ ID NO: 258 - DNA, 40 bp, Artificial Sequence
  sequence surrounding the exon-exon junction in a head-to-tail arrangement of bloodCirc_03652
tgagaagagataaagtaaagagcatgttactctgaggttt

SEQ ID NO: 259 - DNA, 40 bp, Artificial Sequence
  sequence surrounding the exon-exon junction in a head-to-tail arrangement of bloodCirc_11792
cccatcagtgagcattacagattgtgcttcaagaagacca

SEQ ID NO: 260 - DNA, 40 bp, Artificial Sequence
  sequence surrounding the exon-exon junction in a head-to-tail arrangement of bloodCirc_03028
gaactgctgggaggatgacattacaaattataatactgtg

SEQ ID NO: 261 - DNA, 40 bp, Artificial Sequence
  sequence surrounding the exon-exon junction in a head-to-tail arrangement of bloodCirc_11627
cttttggtgaagtgcagttggatggcttaaattccttggt

SEQ ID NO: 262 - DNA, 40 bp, Artificial Sequence
  sequence surrounding the exon-exon junction in a head-to-tail arrangement of bloodCirc_09942
acatttccaaaagtccaaggaaggtgacaaagtacaattt

SEQ ID NO: 263 - DNA, 40 bp, Artificial Sequence
  sequence surrounding the exon-exon junction in a head-to-tail arrangement of bloodCirc_10858
gtgtcttggcggatgagttggctttgatgacagtagggaa

SEQ ID NO: 264 - DNA, 40 bp, Artificial Sequence
  sequence surrounding the exon-exon junction in a head-to-tail arrangement of bloodCirc_07253
caaagccgaagcctaagcaggtgcagttacctttagcagc

SEQ ID NO: 265 - DNA, 40 bp, Artificial Sequence
  sequence surrounding the exon-exon junction in a head-to-tail arrangement of bloodCirc_21408
aaatgtcaacaaattgatgggatctcccagccatccagcc

SEQ ID NO: 266 - DNA, 40 bp, Artificial Sequence
  sequence surrounding the exon-exon junction in a head-to-tail arrangement of bloodCirc_01316
tcatatggcaagttgatccgactggtgaattgacaaaatg

SEQ ID NO: 267 - DNA, 40 bp, Artificial Sequence
  sequence surrounding the exon-exon junction in a head-to-tail arrangement of bloodCirc_06007
aaaaagttgagactgtagaaattttcacccgatggaagac

SEQ ID NO: 268 - DNA, 40 bp, Artificial Sequence
  sequence surrounding the exon-exon junction in a head-to-tail arrangement of bloodCirc_07054
atttagaacatgcatctaaggtttacaaaagatactgcaa

SEQ ID NO: 269 - DNA, 40 bp, Artificial Sequence
  sequence surrounding the exon-exon junction in a head-to-tail arrangement of bloodCirc_18441
gaaaaagatgcagaatctgtaaatttcaagatattgaaga

SEQ ID NO: 270 - DNA, 40 bp, Artificial Sequence
  sequence surrounding the exon-exon junction in a head-to-tail arrangement of bloodCirc_00400
gatactacatattccagatggtgaagacattcagtgaagc

SEQ ID NO: 271 - DNA, 40 bp, Artificial Sequence
  sequence surrounding the exon-exon junction in a head-to-tail arrangement of bloodCirc_02388
caaaccaaacaaggaaaaagaaatggaatctagttcatca

SEQ ID NO: 272 - DNA, 40 bp, Artificial Sequence
  sequence surrounding the exon-exon junction in a head-to-tail arrangement of bloodCirc_00200
gcaatggtgaatttgaaaagggaagaggaagaacgtctga

SEQ ID NO: 273 - DNA, 40 bp, Artificial Sequence
  sequence surrounding the exon-exon junction in a head-to-tail arrangement of bloodCirc_05156
gatggaaaaatttgtgaatgagatataagatcaaggtact

SEQ ID NO: 274 - DNA, 40 bp, Artificial Sequence
  sequence surrounding the exon-exon junction in a head-to-tail arrangement of bloodCirc_02650
agacccatttccagtcatgaggggtaggacagttcactaa

SEQ ID NO: 275 - DNA, 40 bp, Artificial Sequence
  sequence surrounding the exon-exon junction in a head-to-tail arrangement of bloodCirc_05799
tcatgaactcagctattcaggtccccaggtgcatccaatt

SEQ ID NO: 276 - DNA, 40 bp, Artificial Sequence
  sequence surrounding the exon-exon junction in a head-to-tail arrangement of bloodCirc_09092
tgaaacctcccgtgagaaagtgaattgatttttcttgagc

SEQ ID NO: 277 - DNA, 40 bp, Artificial Sequence
  sequence surrounding the exon-exon junction in a head-to-tail arrangement of bloodCirc_10929
tgctacatgaaaaggaagagatggagttttaacattgaat

SEQ ID NO: 278 - DNA, 40 bp, Artificial Sequence
  sequence surrounding the exon-exon junction in a head-to-tail arrangement of bloodCirc_21056
aatggcaggcattttacaaggatgggtcatcagttaagga

SEQ ID NO: 279 - DNA, 40 bp, Artificial Sequence
  sequence surrounding the exon-exon junction in a head-to-tail arrangement of bloodCirc_01937
taagactacttcaggcacaggtcttcccaaaagttatctt

SEQ ID NO: 280 - DNA, 40 bp, Artificial Sequence
  sequence surrounding the exon-exon junction in a head-to-tail arrangement of bloodCirc_08702
tgatgatgtcctggatctgaagatcgagatggtgatcatg

SEQ ID NO: 281 - DNA, 40 bp, Artificial Sequence
  sequence surrounding the exon-exon junction in a head-to-tail arrangement of bloodCirc_00443
taaaggactactcacccctgttcccaacctgcctgtcccc

SEQ ID NO: 282 - DNA, 40 bp, Artificial Sequence
  sequence surrounding the exon-exon junction in a head-to-tail arrangement of bloodCirc_19873
aacttcgaaactcatgcaagtcgtgatgagaggagatgga

SEQ ID NO: 283 - DNA, 40 bp, Artificial Sequence
  sequence surrounding the exon-exon junction in a head-to-tail arrangement of bloodCirc_02286
cttcatcatcatcatcatcggtggtggacataatgcgagt

SEQ ID NO: 284 - DNA, 40 bp, Artificial Sequence
  sequence surrounding the exon-exon junction in a head-to-tail arrangement of bloodCirc_07308
catatccttggatcaatcagcgcgtacttgctttgtaagt

SEQ ID NO: 285 - DNA, 40 bp, Artificial Sequence
  sequence surrounding the exon-exon junction in a head-to-tail arrangement of bloodCirc_20485
agatcatttatatacacatgtgtacctgtgtaatgtggac

SEQ ID NO: 286 - DNA, 40 bp, Artificial Sequence
  sequence surrounding the exon-exon junction in a head-to-tail arrangement of bloodCirc_00417
cacatcagtaattattcttgactattgcagatatcatccg

SEQ ID NO: 287 - DNA, 40 bp, Artificial Sequence
  sequence surrounding the exon-exon junction in a head-to-tail arrangement of bloodCirc_22727
agctggattatcaaggaaaagcccttcataacacaaggct

SEQ ID NO: 288 - DNA, 40 bp, Artificial Sequence
  sequence surrounding the exon-exon junction in a head-to-tail arrangement of bloodCirc_07807
gatttgttcctaaatttaagggtattaatggcattcttgc

SEQ ID NO: 289 - DNA, 40 bp, Artificial Sequence
  sequence surrounding the exon-exon junction in a head-to-tail arrangement of bloodCirc_15663
ataaaggcagctttgaaacaagaagaagttcgtgccccaa

SEQ ID NO: 290 - DNA, 40 bp, Artificial Sequence
  sequence surrounding the exon-exon junction in a head-to-tail arrangement of bloodCirc_11682
cctgctgaacagtattacaggaaatcagaaaagttgtaca

SEQ ID NO: 291 - DNA, 40 bp, Artificial Sequence
  sequence surrounding the exon-exon junction in a head-to-tail arrangement of bloodCirc_18087
ctggattgaattacttagtgggttacacatcattttggaa

SEQ ID NO: 292 - DNA, 40 bp, Artificial Sequence
  sequence surrounding the exon-exon junction in a head-to-tail arrangement of bloodCirc_15886
tggaacgacaacaaaaagagggctgaaaacacagttaaat

SEQ ID NO: 293 - DNA, 40 bp, Artificial Sequence
  sequence surrounding the exon-exon junction in a head-to-tail arrangement of bloodCirc_15146
tgtacataaattcaagaaaggtgattttacaacgagatgc

SEQ ID NO: 294 - DNA, 40 bp, Artificial Sequence
  sequence surrounding the exon-exon junction in a head-to-tail arrangement of bloodCirc_23244
aagaggcacaaacatcaaagggcaaaacatcagaggctct

SEQ ID NO: 295 - DNA, 40 bp, Artificial Sequence
  sequence surrounding the exon-exon junction in a head-to-tail arrangement of bloodCirc_07646
gagaaatcagtgaaagcaagtccagttacaacacagggat

SEQ ID NO: 296 - DNA, 40 bp, Artificial Sequence
  sequence surrounding the exon-exon junction in a head-to-tail arrangement of bloodCirc_09875
gtaacttcacttatttcaggtgaaggtggtgtttttaagg

SEQ ID NO: 297 - DNA, 40 bp, Artificial Sequence
  sequence surrounding the exon-exon junction in a head-to-tail arrangement of bloodCirc_01638
gatgaaatgcaggggacctggcggataaaacggtcccatc

SEQ ID NO: 298 - DNA, 40 bp, Artificial Sequence
  sequence surrounding the exon-exon junction in a head-to-tail arrangement of bloodCirc_20189
cccgtggctgtatctgggaggcatccaattcttctggagt

SEQ ID NO: 299 - DNA, 40 bp, Artificial Sequence
  sequence surrounding the exon-exon junction in a head-to-tail arrangement of bloodCirc_00276
taatgaaagaagaaattcagcaaaatcttaaaaatttgaa

SEQ ID NO: 300 - DNA, 40 bp, Artificial Sequence
  sequence surrounding the exon-exon junction in a head-to-tail arrangement of bloodCirc_08220
gccgattgcatcactatcagatatcagaaaaccaggactc

SEQ ID NO: 301 - DNA, 40 bp, Artificial Sequence
  sequence surrounding the exon-exon junction in a head-to-tail arrangement of bloodCirc_10863
tatttgacgaaaatagactgggagagtcccgtattctcag

SEQ ID NO: 302 - DNA, 40 bp, Artificial Sequence
  sequence surrounding the exon-exon junction in a head-to-tail arrangement of bloodCirc_13077
aaaatcaacaatttgcttaaatacaaggtctcgctgttct

SEQ ID NO: 303 - DNA, 40 bp, Artificial Sequence
  sequence surrounding the exon-exon junction in a head-to-tail arrangement of bloodCirc_04820
ttcacaaaagtgaagagaggacttaattcagtgcacaaat

SEQ ID NO: 304 - DNA, 40 bp, Artificial Sequence
  sequence surrounding the exon-exon junction in a head-to-tail arrangement of bloodCirc_17594
taagcagttaggatctggagctctctatcaatatcagctc

SEQ ID NO: 305 - DNA, 40 bp, Artificial Sequence
  sequence surrounding the exon-exon junction in a head-to-tail arrangement of bloodCirc_07062
ttagccttgttcaaaaagaggttgtggcagcactgcctga

SEQ ID NO: 306 - DNA, 40 bp, Artificial Sequence
  sequence surrounding the exon-exon junction in a head-to-tail arrangement of bloodCirc_16701
gcaagttgtggaagaaatacttgtctgagggaagtcaaaa

SEQ ID NO: 307 - DNA, 40 bp, Artificial Sequence
  sequence surrounding the exon-exon junction in a head-to-tail arrangement of bloodCirc_08004
ccaaagcagctttaataccgaataacaatacttctgaaaa

SEQ ID NO: 308 - DNA, 40 bp, Artificial Sequence
  sequence surrounding the exon-exon junction in a head-to-tail arrangement of bloodCirc_16681
tctatacaaaaacaacaaaagattacttccttaggataga

SEQ ID NO: 309 - DNA, 40 bp, Artificial Sequence
  sequence surrounding the exon-exon junction in a head-to-tail arrangement of bloodCirc_17907
aaaatagccaactcaaatcgctataaagcgttaacagcca

SEQ ID NO: 310 - DNA, 40 bp, Artificial Sequence
  sequence surrounding the exon-exon junction in a head-to-tail arrangement of bloodCirc_05911
tggatacagacaaaataaagttccgatgaagttaaattcc

SEQ ID NO: 311 - DNA, 40 bp, Artificial Sequence
  sequence surrounding the exon-exon junction in a head-to-tail arrangement of bloodCirc_00169
ttggaacacaaagaacatagttggtgtaatacggtgccca

SEQ ID NO: 312 - DNA, 40 bp, Artificial Sequence
  sequence surrounding the exon-exon junction in a head-to-tail arrangement of bloodCirc_14223
tctgaacctgagagcaacagcaacaaggaaaaattcagga

SEQ ID NO: 313 - DNA, 40 bp, Artificial Sequence
  sequence surrounding the exon-exon junction in a head-to-tail arrangement of bloodCirc_22527
ggatggctgcggggctccaagatagaatttttgcggcatt

SEQ ID NO: 314 - DNA, 40 bp, Artificial Sequence
  sequence surrounding the exon-exon junction in a head-to-tail arrangement of bloodCirc_09138
gttcgcgtatttcttgacagagtttatgtggccgaggcag

SEQ ID NO: 315 - DNA, 40 bp, Artificial Sequence
  sequence surrounding the exon-exon junction in a head-to-tail arrangement of bloodCirc_18377
ttctggataatggtgaatggaataattgtgtgcccaagaa

SEQ ID NO: 316 - DNA, 40 bp, Artificial Sequence
  sequence surrounding the exon-exon junction in a head-to-tail arrangement of bloodCirc_18506
gatgatcttcaaacaaaccagatattcgaaatcaaagaat

SEQ ID NO: 317 - DNA, 40 bp, Artificial Sequence
  sequence surrounding the exon-exon junction in a head-to-tail arrangement of bloodCirc_10787
gaatcaaagtatggacacaggttcgatacaagaggctgtt

SEQ ID NO: 318 - DNA, 40 bp, Artificial Sequence
  sequence surrounding the exon-exon junction in a head-to-tail arrangement of bloodCirc_04075
aactggctcttcaaattgaagcagaagatgatgaaacacc

SEQ ID NO: 319 - DNA, 40 bp, Artificial Sequence
  sequence surrounding the exon-exon junction in a head-to-tail arrangement of bloodCirc_19214
gaatagataacaagtgcagtgcaccagttagaagacaaat

SEQ ID NO: 320 - DNA, 40 bp, Artificial Sequence
  sequence surrounding the exon-exon junction in a head-to-tail arrangement of bloodCirc_19533
aaatggagctctctatgaaggcagaagctgaggaagattg

SEQ ID NO: 321 - DNA, 40 bp, Artificial Sequence
  sequence surrounding the exon-exon junction in a head-to-tail arrangement of bloodCirc_10179
cctggctgaaagacaaaaattggaggaatcagacatcatt

SEQ ID NO: 322 - DNA, 40 bp, Artificial Sequence
  sequence surrounding the exon-exon junction in a head-to-tail arrangement of bloodCirc_09309
tagaatttgcacaatataagacctttgaaactcacaactc

SEQ ID NO: 323 - DNA, 40 bp, Artificial Sequence
  sequence surrounding the exon-exon junction in a head-to-tail arrangement of bloodCirc_16985
atgctgtagtagcaaatcagacgagcaaaaatcaaattaa

SEQ ID NO: 324 - DNA, 40 bp, Artificial Sequence
  sequence surrounding the exon-exon junction in a head-to-tail arrangement of bloodCirc_06320
acatctctcagagacgaaagttccaggaatggatggaggt

SEQ ID NO: 325 - DNA, 40 bp, Artificial Sequence
  sequence surrounding the exon-exon junction in a head-to-tail arrangement of bloodCirc_15439
gtgaaggagatgaagtagagggatttatcaaagatgttca

SEQ ID NO: 326 - DNA, 40 bp, Artificial Sequence
  sequence surrounding the exon-exon junction in a head-to-tail arrangement of bloodCirc_18715
tttaaagctcatgaaaacagaacgtggaatcttgtagaag

SEQ ID NO: 327 - DNA, 40 bp, Artificial Sequence
  sequence surrounding the exon-exon junction in a head-to-tail arrangement of bloodCirc_20193
gagacattgtctggggaaaggtctggcctgattttcctga

SEQ ID NO: 328 - DNA, 40 bp, Artificial Sequence
  sequence surrounding the exon-exon junction in a head-to-tail arrangement of bloodCirc_02184
aagattgactagtttcacaggaacaatgccacacaaccaa

SEQ ID NO: 329 - DNA, 40 bp, Artificial Sequence
  sequence surrounding the exon-exon junction in a head-to-tail arrangement of bloodCirc_00394
tccagcagcagatgcagcagttccaagatgagatgggatt

SEQ ID NO: 330 - DNA, 40 bp, Artificial Sequence
  sequence surrounding the exon-exon junction in a head-to-tail arrangement of bloodCirc_21181
ttccgattgggagggacaagcacttgcacctcctgcgccg

SEQ ID NO: 331 - DNA, 40 bp, Artificial Sequence
  sequence surrounding the exon-exon junction in a head-to-tail arrangement of bloodCirc_13696
aaagacaagagccctgtgaggaggaaaaaaagcaagagca

SEQ ID NO: 332 - DNA, 40 bp, Artificial Sequence
  sequence surrounding the exon-exon junction in a head-to-tail arrangement of bloodCirc_17137
tgcatttccatatggcaatggagattacctggggcaattg

SEQ ID NO: 333 - DNA, 40 bp, Artificial Sequence
  sequence surrounding the exon-exon junction in a head-to-tail arrangement of bloodCirc_02329
caaaccagcagcactaacagggggattcccgaagtcttcc

SEQ ID NO: 334 - DNA, 40 bp, Artificial Sequence
  sequence surrounding the exon-exon junction in a head-to-tail arrangement of bloodCirc_08087
agttgtcttcagtagaaaggaagcacagatcagatttcta

SEQ ID NO: 335 - DNA, 40 bp, Artificial Sequence
  sequence surrounding the exon-exon junction in a head-to-tail arrangement of bloodCirc_22808
tagaagccggcgtaaagagtctcttagtaagattacacat

SEQ ID NO: 336 - DNA, 40 bp, Artificial Sequence
  sequence surrounding the exon-exon junction in a head-to-tail arrangement of bloodCirc_06741
agtaatttgccttctggattacaaggcgcctctgtcgaag

SEQ ID NO: 337 - DNA, 40 bp, Artificial Sequence
  sequence surrounding the exon-exon junction in a head-to-tail arrangement of bloodCirc_15306
tattcttctccttgctgttgcttcaaaagcagtggactgt

SEQ ID NO: 338 - DNA, 40 bp, Artificial Sequence
  sequence surrounding the exon-exon junction in a head-to-tail arrangement of bloodCirc_21571
tcctaacactttattaccagataggaaaggaacatgttgg

SEQ ID NO: 339 - DNA, 40 bp, Artificial Sequence
  sequence surrounding the exon-exon junction in a head-to-tail arrangement of bloodCirc_13002
tcaaatactcttatttccagtgcttaaaattgaacaaaca

SEQ ID NO: 340 - DNA, 40 bp, Artificial Sequence
  sequence surrounding the exon-exon junction in a head-to-tail arrangement of bloodCirc_02797
tcagaagaaatacagaagcgtgcagcagctgtggctccta

SEQ ID NO: 341 - DNA, 40 bp, Artificial Sequence
  sequence surrounding the exon-exon junction in a head-to-tail arrangement of bloodCirc_01565
aatgccttcatcttttttggtgacctgaaaaaaatgtctg

SEQ ID NO: 342 - DNA, 40 bp, Artificial Sequence
  sequence surrounding the exon-exon junction in a head-to-tail arrangement of bloodCirc_02928
tcctgaagaaataccaccagatcaatgaactgagccatgt

SEQ ID NO: 343 - DNA, 40 bp, Artificial Sequence
  sequence surrounding the exon-exon junction in a head-to-tail arrangement of bloodCirc_03884
cactggtttgcagagtccagaatttggatttaacaaaaag

SEQ ID NO: 344 - DNA, 40 bp, Artificial Sequence
  sequence surrounding the exon-exon junction in a head-to-tail arrangement of bloodCirc_04534
acagggaactccggggagaggtgtgggatgtgattggccg

SEQ ID NO: 345 - DNA, 40 bp, Artificial Sequence
  sequence surrounding the exon-exon junction in a head-to-tail arrangement of bloodCirc_13232
tccaaggaaccagtgcgaagtaatctatgccagcaattat

SEQ ID NO: 346 - DNA, 40 bp, Artificial Sequence
  sequence surrounding the exon-exon junction in a head-to-tail arrangement of bloodCirc_05898
aatatcgtcatcgttagaaggaagctgaatatggtgggca

SEQ ID NO: 347 - DNA, 40 bp, Artificial Sequence
  sequence surrounding the exon-exon junction in a head-to-tail arrangement of bloodCirc_14988
aggagcagaaaactttacagtaactatgtttccggtagcc

SEQ ID NO: 348 - DNA, 40 bp, Artificial Sequence
  sequence surrounding the exon-exon junction in a head-to-tail arrangement of bloodCirc_22417
tggaagggaattcagacacagcaacagctgaacagatgcg

SEQ ID NO: 349 - DNA, 40 bp, Artificial Sequence
  sequence surrounding the exon-exon junction in a head-to-tail arrangement of bloodCirc_06760
gcaaactttttaatgaggaaacaatcccatgaggttggta

SEQ ID NO: 350 - DNA, 40 bp, Artificial Sequence
  sequence surrounding the exon-exon junction in a head-to-tail arrangement of bloodCirc_02652
ttcctttgcttttctttataggggtaggacagttcactaa

SEQ ID NO: 351 - DNA, 40 bp, Artificial Sequence
  sequence surrounding the exon-exon junction in a head-to-tail arrangement of bloodCirc_13125
ggaactcttggttgggataaggaagagacttccaccttag

SEQ ID NO: 352 - DNA, 40 bp, Artificial Sequence
  sequence surrounding the exon-exon junction in a head-to-tail arrangement of bloodCirc_07060
gtcacagagaaaaatgaacgcaaaagcggcgccaggaaat

SEQ ID NO: 353 - DNA, 40 bp, Artificial Sequence
  sequence surrounding the exon-exon junction in a head-to-tail arrangement of bloodCirc_18429
cacaaagagaaatagaaaagagctaccatagaggaggcat

SEQ ID NO: 354 - DNA, 40 bp, Artificial Sequence
  sequence surrounding the exon-exon junction in a head-to-tail arrangement of bloodCirc_07683
acttctataaagtcatccagtcagaaaaatgggtaagaag

SEQ ID NO: 355 - DNA, 40 bp, Artificial Sequence
  sequence surrounding the exon-exon junction in a head-to-tail arrangement of bloodCirc_20868
ccgcctcttacagtcacgaggaatagtaaagaaacacatc

SEQ ID NO: 356 - DNA, 40 bp, Artificial Sequence
  sequence surrounding the exon-exon junction in a head-to-tail arrangement of bloodCirc_02331
ttacactggaactggacaggggggattcccgaagtcttcc

SEQ ID NO: 357 - DNA, 40 bp, Artificial Sequence
  sequence surrounding the exon-exon junction in a head-to-tail arrangement of bloodCirc_04405
gtttgtattccagagactagcatccaggatattgcagtcc

SEQ ID NO: 358 - DNA, 40 bp, Artificial Sequence
  sequence surrounding the exon-exon junction in a head-to-tail arrangement of bloodCirc_16983
acccatttaatccccctaagacgagcaaaaatcaaattaa

SEQ ID NO: 359 - DNA, 40 bp, Artificial Sequence
  sequence surrounding the exon-exon junction in a head-to-tail arrangement of bloodCirc_16811
gtatagagaatcatttgaagttttttaaatgtctagcata

SEQ ID NO: 360 - DNA, 40 bp, Artificial Sequence
  sequence surrounding the exon-exon junction in a head-to-tail arrangement of bloodCirc_08802
gaatcaaaggataatacaatttttaaaggacaccttggaa

SEQ ID NO: 361 - DNA, 40 bp, Artificial Sequence
  sequence surrounding the exon-exon junction in a head-to-tail arrangement of bloodCirc_05515
ttgggctgcctttcctgcaggcttctaaccctcctttatg

SEQ ID NO: 362 - DNA, 40 bp, Artificial Sequence
  sequence surrounding the exon-exon junction in a head-to-tail arrangement of bloodCirc_00483
aaaatcagcagaggatgcaggcaacagaacattgaggaaa

SEQ ID NO: 363 - DNA, 40 bp, Artificial Sequence
  sequence surrounding the exon-exon junction in a head-to-tail arrangement of bloodCirc_03851
acatgattttgaccccacaggtttcccctcaaaaaaccta

SEQ ID NO: 364 - DNA, 40 bp, Artificial Sequence
  sequence surrounding the exon-exon junction in a head-to-tail arrangement of bloodCirc_19220
tttcttctcctctgaattcttcacttgggaattcttcaat

SEQ ID NO: 365 - DNA, 40 bp, Artificial Sequence
  sequence surrounding the exon-exon junction in a head-to-tail arrangement of bloodCirc_16618
actatagagaaaaacaaaagggaggcttgtggatcagaat

SEQ ID NO: 366 - DNA, 40 bp, Artificial Sequence
  sequence surrounding the exon-exon junction in a head-to-tail arrangement of bloodCirc_06199
tcaacattgcccagcaagtggccggtctaattgaagccaa

SEQ ID NO: 367 - DNA, 40 bp, Artificial Sequence
  sequence surrounding the exon-exon junction in a head-to-tail arrangement of bloodCirc_13881
accatctcccaaacaggatggcataaatgaaatctcggaa

SEQ ID NO: 368 - DNA, 40 bp, Artificial Sequence
  sequence surrounding the exon-exon junction in a head-to-tail arrangement of bloodCirc_15830
tcatgaatacagctggaaatactggtaataacaacaacaa

SEQ ID NO: 369 - DNA, 40 bp, Artificial Sequence
  sequence surrounding the exon-exon junction in a head-to-tail arrangement of bloodCirc_01339
tagaatttcttatccaagtgagtaatgaacctcatgagac

SEQ ID NO: 370 - DNA, 40 bp, Artificial Sequence
  sequence surrounding the exon-exon junction in a head-to-tail arrangement of bloodCirc_21917
cctgacaacccagataacagtaaaacagaccatcagtaac

SEQ ID NO: 371 - DNA, 40 bp, Artificial Sequence
  sequence surrounding the exon-exon junction in a head-to-tail arrangement of bloodCirc_17404
aaccacctccaaaaaccaagtgtgccacctgggcttgaag

SEQ ID NO: 372 - DNA, 40 bp, Artificial Sequence
  sequence surrounding the exon-exon junction in a head-to-tail arrangement of bloodCirc_10799
tttatactgaatgagttactggttgactggattggtgagg

SEQ ID NO: 373 - DNA, 40 bp, Artificial Sequence
  sequence surrounding the exon-exon junction in a head-to-tail arrangement of bloodCirc_08584
gaatcttggacctcatccagccagaagaaattcaacagca

SEQ ID NO: 374 - DNA, 40 bp, Artificial Sequence
  sequence surrounding the exon-exon junction in a head-to-tail arrangement of bloodCirc_09579
gtatctgtgcaggcaatgtgtagcacttgtaccatgggct

SEQ ID NO: 375 - DNA, 40 bp, Artificial Sequence
  sequence surrounding the exon-exon junction in a head-to-tail arrangement of bloodCirc_01693
gtcccggagcctcgatggagcaagagcagtatgaaagtac

SEQ ID NO: 376 - DNA, 40 bp, Artificial Sequence
  sequence surrounding the exon-exon junction in a head-to-tail arrangement of bloodCirc_20192
tggctgcccagatcccttatgatgtgcagtactcagacat

SEQ ID NO: 377 - DNA, 40 bp, Artificial Sequence
  sequence surrounding the exon-exon junction in a head-to-tail arrangement of bloodCirc_03072
agcagcagaaaaatctcaagaaaactaagcctacaaataa

SEQ ID NO: 378 - DNA, 40 bp, Artificial Sequence
  sequence surrounding the exon-exon junction in a head-to-tail arrangement of bloodCirc_21122
ccacactgctgaaaaatctggctctagaccaagatagaac

SEQ ID NO: 379 - DNA, 40 bp, Artificial Sequence
  sequence surrounding the exon-exon junction in a head-to-tail arrangement of bloodCirc_11808
gaggatcaggaaaaactatggaagcctggagccagaggac

SEQ ID NO: 380 - DNA, 40 bp, Artificial Sequence
  sequence surrounding the exon-exon junction in a head-to-tail arrangement of bloodCirc_18633
agcacatatatagagctcagagttttggaggctggaaagg

SEQ ID NO: 381 - DNA, 40 bp, Artificial Sequence
  sequence surrounding the exon-exon junction in a head-to-tail arrangement of bloodCirc_06793
caagatctaaatttagacagtgaagttattcgaagtcatt

SEQ ID NO: 382 - DNA, 40 bp, Artificial Sequence
  sequence surrounding the exon-exon junction in a head-to-tail arrangement of bloodCirc_02441
atgcatactaccttgtactggttgaagaaatatggagatc

SEQ ID NO: 383 - DNA, 40 bp, Artificial Sequence
  sequence surrounding the exon-exon junction in a head-to-tail arrangement of bloodCirc_00317
tgctgccgccggaagtacagctttgcttgtgccatctgcc

SEQ ID NO: 384 - DNA, 40 bp, Artificial Sequence
  sequence surrounding the exon-exon junction in a head-to-tail arrangement of bloodCirc_05925
gttgaatgcggaggaccaaagctgacttatccttgtataa

SEQ ID NO: 385 - DNA, 40 bp, Artificial Sequence
  sequence surrounding the exon-exon junction in a head-to-tail arrangement of bloodCirc_09920
ttgttgggacatgtatattgtacactcagaagaagccttg

SEQ ID NO: 386 - DNA, 40 bp, Artificial Sequence
  sequence surrounding the exon-exon junction in a head-to-tail arrangement of bloodCirc_18485
taagaaaagcacaattacagataagtttataccatggata

SEQ ID NO: 387 - DNA, 40 bp, Artificial Sequence
  sequence surrounding the exon-exon junction in a head-to-tail arrangement of bloodCirc_06721
gccatatgatttatcggaaggtggctcaatcccttgttta

SEQ ID NO: 388 - DNA, 40 bp, Artificial Sequence
  sequence surrounding the exon-exon junction in a head-to-tail arrangement of bloodCirc_00393
gtagcaccaggatatgtcttttccaagatgagatgggatt

SEQ ID NO: 389 - DNA, 40 bp, Artificial Sequence
  sequence surrounding the exon-exon junction in a head-to-tail arrangement of bloodCirc_01882
ggtcacagtatcacaaggagcatctggtgcaaatcatttt

SEQ ID NO: 390 - DNA, 40 bp, Artificial Sequence
  sequence surrounding the exon-exon junction in a head-to-tail arrangement of bloodCirc_03896
caggaagaagtgccattcagcattttaagaaagaaagatg

SEQ ID NO: 391 - DNA, 40 bp, Artificial Sequence
  sequence surrounding the exon-exon junction in a head-to-tail arrangement of bloodCirc_06549
aaagatgggagaaaaaaatgaatgtttcatccatttgtgg

SEQ ID NO: 392 - DNA, 40 bp, Artificial Sequence
  sequence surrounding the exon-exon junction in a head-to-tail arrangement of bloodCirc_10785
gaatcaaagtatggacacagcacttgctctgaaatttggg

SEQ ID NO: 393 - DNA, 40 bp, Artificial Sequence
  sequence surrounding the exon-exon junction in a head-to-tail arrangement of bloodCirc_06941
aatgccaacctttgagtcaggcccggattgcatttctaca

SEQ ID NO: 394 - DNA, 40 bp, Artificial Sequence
  sequence surrounding the exon-exon junction in a head-to-tail arrangement of bloodCirc_06310
tcatgacctcagactatcagcttcagaagctgcttaccat

SEQ ID NO: 395 - DNA, 40 bp, Artificial Sequence
  sequence surrounding the exon-exon junction in a head-to-tail arrangement of bloodCirc_09968
acacatgaaaacacacactgcacacacaaaagacatgcca

SEQ ID NO: 396 - DNA, 40 bp, Artificial Sequence
  sequence surrounding the exon-exon junction in a head-to-tail arrangement of bloodCirc_16163
aaaaacaattagagcatcaggaaacagtactgctggagca

SEQ ID NO: 397 - DNA, 40 bp, Artificial Sequence
  sequence surrounding the exon-exon junction in a head-to-tail arrangement of bloodCirc_07694
acaattttggaagctcaaagacatggagattaagtagctt

SEQ ID NO: 398 - DNA, 40 bp, Artificial Sequence
  sequence surrounding the exon-exon junction in a head-to-tail arrangement of bloodCirc_02708
tccagaaactccaggaccagacatccacgacagcgatggc

SEQ ID NO: 399 - DNA, 40 bp, Artificial Sequence
  sequence surrounding the exon-exon junction in a head-to-tail arrangement of bloodCirc_05496
taaaagagcagcactccaagatatatctttagaaatgagt

SEQ ID NO: 400 - DNA, 40 bp, Artificial Sequence
  sequence surrounding the exon-exon junction in a head-to-tail arrangement of bloodCirc_14614
ccatggagaagcataaagaggatatttttaaacaagctac

SEQ ID NO: 401 - DNA, 40 bp, Artificial Sequence
  sequence surrounding the exon-exon junction in a head-to-tail arrangement of bloodCirc_12064
tacagtcagaagcaaaaatgcgttttaccaacgaggatca

SEQ ID NO: 402 - DNA, 40 bp, Artificial Sequence
  sequence surrounding the exon-exon junction in a head-to-tail arrangement of bloodCirc_03039
cttattactgatcttcaagaagaaagtccatgaaatggaa

SEQ ID NO: 403 - DNA, 40 bp, Artificial Sequence
  sequence surrounding the exon-exon junction in a head-to-tail arrangement of bloodCirc_07693
ttttggaagctcaaaggtagacatggagattaagtagctt

SEQ ID NO: 404 - DNA, 40 bp, Artificial Sequence
  sequence surrounding the exon-exon junction in a head-to-tail arrangement of bloodCirc_10271
tgcagtagaagttcttgttgtgaacacttgtcctgctcct

SEQ ID NO: 405 - DNA, 40 bp, Artificial Sequence
  sequence surrounding the exon-exon junction in a head-to-tail arrangement of bloodCirc_10970
cagaaatggccaatatctgggaatcaaggcaaaataaaga

SEQ ID NO: 406 - DNA, 40 bp, Artificial Sequence
  sequence surrounding the exon-exon junction in a head-to-tail arrangement of bloodCirc_04710
aggaaatgtataagctacagattcttctgtgtgactcttg

SEQ ID NO: 407 - DNA, 40 bp, Artificial Sequence
  sequence surrounding the exon-exon junction in a head-to-tail arrangement of bloodCirc_23217
agcgagaaaaattgagagagtgagcagtgaagattcagaa

SEQ ID NO: 408 - DNA, 40 bp, Artificial Sequence
  sequence surrounding the exon-exon junction in a head-to-tail arrangement of bloodCirc_12082
taccctcaatggaaaaagaagacatggatttgattgacat

SEQ ID NO: 409 - DNA, 40 bp, Artificial Sequence
  sequence surrounding the exon-exon junction in a head-to-tail arrangement of bloodCirc_00788
aagtacagaatgcagaacaggtttcaacccttcagagacc

SEQ ID NO: 410 - DNA, 40 bp, Artificial Sequence
  sequence surrounding the exon-exon junction in a head-to-tail arrangement of bloodCirc_05414
tcaaactcctgtgaatacagcatccacccaacccaccagt

SEQ ID NO: 411 - DNA, 40 bp, Artificial Sequence
  sequence surrounding the exon-exon junction in a head-to-tail arrangement of bloodCirc_20442
ggatgcccctgtttctggtggtagtatcttccccagcaga

SEQ ID NO: 412 - DNA, 40 bp, Artificial Sequence
  sequence surrounding the exon-exon junction in a head-to-tail arrangement of bloodCirc_21415
caatgttctccaaagataagatcctgtctacctttcatga

SEQ ID NO: 413 - DNA, 40 bp, Artificial Sequence
  sequence surrounding the exon-exon junction in a head-to-tail arrangement of bloodCirc_16141
aggatgaatttgatagagaggaaaggaaacagattcattg

SEQ ID NO: 414 - DNA, 40 bp, Artificial Sequence
  sequence surrounding the exon-exon junction in a head-to-tail arrangement of bloodCirc_15039
gaatctcagtccaacaaaaggttgttcttttaaagaatta

SEQ ID NO: 415 - DNA, 40 bp, Artificial Sequence
  sequence surrounding the exon-exon junction in a head-to-tail arrangement of bloodCirc_01723
agaagccggagtcattcaaggattatatgcgtcaggcagg

SEQ ID NO: 416 - DNA, 40 bp, Artificial Sequence
  sequence surrounding the exon-exon junction in a head-to-tail arrangement of bloodCirc_12722
gcctggtgtcacaaaagcagatctatccatactaatggaa

SEQ ID NO: 417 - DNA, 40 bp, Artificial Sequence
  sequence surrounding the exon-exon junction in a head-to-tail arrangement of bloodCirc_01585
ttctcctccgctggacataggtcaaaggtcgtgataaaca

SEQ ID NO: 418 - DNA, 40 bp, Artificial Sequence
  sequence surrounding the exon-exon junction in a head-to-tail arrangement of bloodCirc_04814
aggaattattaatttgttggacttaattcagtgcacaaat

SEQ ID NO: 419 - DNA, 40 bp, Artificial Sequence
  sequence surrounding the exon-exon junction in a head-to-tail arrangement of bloodCirc_06795
tcgtacatcgagacctcaagtgaagttattcgaagtcatt

SEQ ID NO: 420 - DNA, 40 bp, Artificial Sequence
  sequence surrounding the exon-exon junction in a head-to-tail arrangement of bloodCirc_18206
atctacctattcttcaaatggtcgttgaggacttccacat

SEQ ID NO: 421 - DNA, 40 bp, Artificial Sequence
  sequence surrounding the exon-exon junction in a head-to-tail arrangement of bloodCirc_08277
acatgtagagacctttgtatgtatttctggtggtcgcatt

SEQ ID NO: 422 - DNA, 40 bp, Artificial Sequence
  sequence surrounding the exon-exon junction in a head-to-tail arrangement of bloodCirc_15888
tggaacgacaacaaaaagagacgtatattatatgagaagc

SEQ ID NO: 423 - DNA, 40 bp, Artificial Sequence
  sequence surrounding the exon-exon junction in a head-to-tail arrangement of bloodCirc_14215
gactatactaatgagtacaggcttattgcagtatattata

SEQ ID NO: 424 - DNA, 40 bp, Artificial Sequence
  sequence surrounding the exon-exon junction in a head-to-tail arrangement of bloodCirc_21103
tgaccatctcacatgccacatacaaaaattgagaaagaga

SEQ ID NO: 425 - DNA, 40 bp, Artificial Sequence
  sequence surrounding the exon-exon junction in a head-to-tail arrangement of bloodCirc_03209
caagttccttatggctaatggaatgtatcctgtcaggtat

SEQ ID NO: 426 - DNA, 40 bp, Artificial Sequence
  sequence surrounding the exon-exon junction in a head-to-tail arrangement of bloodCirc_20435
tgatttacattcttagcaagaagaagaagaggacagtgct

SEQ ID NO: 427 - DNA, 40 bp, Artificial Sequence
  sequence surrounding the exon-exon junction in a head-to-tail arrangement of bloodCirc_18379
aaaattagcagacagtctaggctgagagcacagacaaaac

SEQ ID NO: 428 - DNA, 40 bp, Artificial Sequence
  sequence surrounding the exon-exon junction in a head-to-tail arrangement of bloodCirc_07964
tgggaaggaatctatccaagggacttcagtactagtgcta

SEQ ID NO: 429 - DNA, 40 bp, Artificial Sequence
  sequence surrounding the exon-exon junction in a head-to-tail arrangement of bloodCirc_09370
tatcaaaggaaagaaaaatagctgtgtacatgatgccaac

SEQ ID NO: 430 - DNA, 40 bp, Artificial Sequence
  sequence surrounding the exon-exon junction in a head-to-tail arrangement of bloodCirc_20041
tgtgatctaccagaagagagttgtgctgcatggaaacaac

SEQ ID NO: 431 - DNA, 40 bp, Artificial Sequence
  sequence surrounding the exon-exon junction in a head-to-tail arrangement of bloodCirc_11772
ggtcaacaaaacaatttaaggttatcaagttatacccaac

SEQ ID NO: 432 - DNA, 40 bp, Artificial Sequence
  sequence surrounding the exon-exon junction in a head-to-tail arrangement of bloodCirc_12227
agcacctgaagttattttagttttgcacagtaataagttg

SEQ ID NO: 433 - DNA, 40 bp, Artificial Sequence
  sequence surrounding the exon-exon junction in a head-to-tail arrangement of bloodCirc_21187
tgcccgaggagagttaacagcacttgcacctcctgcgccg

SEQ ID NO: 434 - DNA, 40 bp, Artificial Sequence
  sequence surrounding the exon-exon junction in a head-to-tail arrangement of bloodCirc_06474
tttagagagcatcagcaatacacaagtgcatacaccttga

SEQ ID NO: 435 - DNA, 40 bp, Artificial Sequence
  sequence surrounding the exon-exon junction in a head-to-tail arrangement of bloodCirc_07887
aagaaaagaactttggaagagtgaagctgaacccagatct

SEQ ID NO: 436 - DNA, 40 bp, Artificial Sequence
  sequence surrounding the exon-exon junction in a head-to-tail arrangement of bloodCirc_04380
ggtggtgaggccctgggcagattactggtggtctaccctt

SEQ ID NO: 437 - DNA, 40 bp, Artificial Sequence
  sequence surrounding the exon-exon junction in a head-to-tail arrangement of bloodCirc_20067
ttgtcgattcattaaaatagtacttgattctaaagctcga

SEQ ID NO: 438 - DNA, 40 bp, Artificial Sequence
  sequence surrounding the exon-exon junction in a head-to-tail arrangement of bloodCirc_01978
gtctgatccttttgttggcaatctcttctctgaaagctga

SEQ ID NO: 439 - DNA, 40 bp, Artificial Sequence
  sequence surrounding the exon-exon junction in a head-to-tail arrangement of bloodCirc_05796
tcatgaactcagctattcagatacaattgaaaaggaaata

SEQ ID NO: 440 - DNA, 40 bp, Artificial Sequence
  sequence surrounding the exon-exon junction in a head-to-tail arrangement of bloodCirc_06458
aattagattttctaaatctgaaaacttgtcagccaaagaa

SEQ ID NO: 441 - DNA, 40 bp, Artificial Sequence
  sequence surrounding the exon-exon junction in a head-to-tail arrangement of bloodCirc_12631
ccagagtgacaaaaaagaaggctactgtggagccgatatc

SEQ ID NO: 442 - DNA, 40 bp, Artificial Sequence
  sequence surrounding the exon-exon junction in a head-to-tail arrangement of bloodCirc_16247
aagaaacaataaaagaaaaggtaccaggttgaattggaaa

SEQ ID NO: 443 - DNA, 40 bp, Artificial Sequence
  sequence surrounding the exon-exon junction in a head-to-tail arrangement of bloodCirc_16972
agcttgatgaagatgcggagatgaagaagatgactttatg

SEQ ID NO: 444 - DNA, 40 bp, Artificial Sequence
  sequence surrounding the exon-exon junction in a head-to-tail arrangement of bloodCirc_12660
ataccaagcacctccaatagcactgctgaagctgtactac

SEQ ID NO: 445 - DNA, 40 bp, Artificial Sequence
  sequence surrounding the exon-exon junction in a head-to-tail arrangement of bloodCirc_03207
agcagaagccctggcatctagaatgtatcctgtcaggtat

SEQ ID NO: 446 - DNA, 40 bp, Artificial Sequence
  sequence surrounding the exon-exon junction in a head-to-tail arrangement of bloodCirc_14164
tcccattacagatagaagaggtcaaaggccctttcagaag

SEQ ID NO: 447 - DNA, 40 bp, Artificial Sequence
  sequence surrounding the exon-exon junction in a head-to-tail arrangement of bloodCirc_03806
ttgcaccttacttacctcaaagaggtgtgggaaatggaac

SEQ ID NO: 448 - DNA, 40 bp, Artificial Sequence
  sequence surrounding the exon-exon junction in a head-to-tail arrangement of bloodCirc_18891
ctcacttttggagatagcagtcactgatgaacctcaaata

SEQ ID NO: 449 - DNA, 40 bp, Artificial Sequence
  sequence surrounding the exon-exon junction in a head-to-tail arrangement of bloodCirc_10683
cttcggcataaaacaacaaggagccaccagaaatggaact

SEQ ID NO: 450 - DNA, 40 bp, Artificial Sequence
  sequence surrounding the exon-exon junction in a head-to-tail arrangement of bloodCirc_12223
gacgctgtaaacctctgaagccctagggtggtcccaacca

SEQ ID NO: 451 - DNA, 40 bp, Artificial Sequence
  sequence surrounding the exon-exon junction in a head-to-tail arrangement of bloodCirc_22413
caagcgagcccggggtagaggcaacagctgaacagatgcg

SEQ ID NO: 452 - DNA, 40 bp, Artificial Sequence
  sequence surrounding the exon-exon junction in a head-to-tail arrangement of bloodCirc_17718
agaatgaagaaaatacccagcacccatatatctcccatca

SEQ ID NO: 453 - DNA, 40 bp, Artificial Sequence
  sequence surrounding the exon-exon junction in a head-to-tail arrangement of bloodCirc_18147
taccaaatatggaaataaggagaattttagcaccctatac

SEQ ID NO: 454 - DNA, 40 bp, Artificial Sequence
  sequence surrounding the exon-exon junction in a head-to-tail arrangement of bloodCirc_01647
taagcagtgcagaaacacagcaacatcatgacaacagaga

SEQ ID NO: 455 - DNA, 40 bp, Artificial Sequence
  sequence surrounding the exon-exon junction in a head-to-tail arrangement of bloodCirc_18058
tgtaaaagatcagccttcagcaagtcaagccagagatctg

SEQ ID NO: 456 - DNA, 40 bp, Artificial Sequence
  sequence surrounding the exon-exon junction in a head-to-tail arrangement of bloodCirc_16094
tgatgcatcatctgcatcagtctcaaagtggtgaaggagg

SEQ ID NO: 457 - DNA, 40 bp, Artificial Sequence
  sequence surrounding the exon-exon junction in a head-to-tail arrangement of bloodCirc_03636
aagccaagttttgccaccaaattcattggttttcaatttt

SEQ ID NO: 458 - DNA, 40 bp, Artificial Sequence
  sequence surrounding the exon-exon junction in a head-to-tail arrangement of bloodCirc_07659
cttctctgttggcctctcaggatgaaacaagtgaagatgc

SEQ ID NO: 459 - DNA, 40 bp, Artificial Sequence
  sequence surrounding the exon-exon junction in a head-to-tail arrangement of bloodCirc_01488
tgagaggagagtggactgaggtacaagaatattccacaga

SEQ ID NO: 460 - DNA, 40 bp, Artificial Sequence
  sequence surrounding the exon-exon junction in a head-to-tail arrangement of bloodCirc_18726
atagcaaaagcttatgctgcagcaaattcgattaaagaat

SEQ ID NO: 461 - DNA, 40 bp, Artificial Sequence
  sequence surrounding the exon-exon junction in a head-to-tail arrangement of bloodCirc_21934
ccctatggctgctgcttttgatattttctaaatttggcac

SEQ ID NO: 462 - DNA, 40 bp, Artificial Sequence
  sequence surrounding the exon-exon junction in a head-to-tail arrangement of bloodCirc_11181
aggaagccaccgcccagaagtgacatgaagtccgagagga

SEQ ID NO: 463 - DNA, 40 bp, Artificial Sequence
  sequence surrounding the exon-exon junction in a head-to-tail arrangement of bloodCirc_17532
tccgtggagctggaaagcagcgaagaatagccagaattca

SEQ ID NO: 464 - DNA, 40 bp, Artificial Sequence
  sequence surrounding the exon-exon junction in a head-to-tail arrangement of bloodCirc_00404
agaagtcaaggaagaaggagaatggaacaaaagtgggact

SEQ ID NO: 465 - DNA, 40 bp, Artificial Sequence
  sequence surrounding the exon-exon junction in a head-to-tail arrangement of bloodCirc_16639
ttcctctcatcattggacagttgtatccgcagtgtcaaga

SEQ ID NO: 466 - DNA, 40 bp, Artificial Sequence
  sequence surrounding the exon-exon junction in a head-to-tail arrangement of bloodCirc_11038
aaaaagacgaggatgaaaagaacacccaaacagaaactga

SEQ ID NO: 467 - DNA, 40 bp, Artificial Sequence
  sequence surrounding the exon-exon junction in a head-to-tail arrangement of bloodCirc_12628
ccctaccttcattttacaatgctactgtggagccgatatc

SEQ ID NO: 468 - DNA, 40 bp, Artificial Sequence
  sequence surrounding the exon-exon junction in a head-to-tail arrangement of bloodCirc_20317
tcttcttccttaggaaaccagttcattttccagacactga

SEQ ID NO: 469 - DNA, 40 bp, Artificial Sequence
  sequence surrounding the exon-exon junction in a head-to-tail arrangement of bloodCirc_07790
cctcactgagatggaaacagaatatgaagaatcttcctta

SEQ ID NO: 470 - DNA, 40 bp, Artificial Sequence
  sequence surrounding the exon-exon junction in a head-to-tail arrangement of bloodCirc_03959
tccacagtcttcctctataggacatttctgatttatttgc

SEQ ID NO: 471 - DNA, 40 bp, Artificial Sequence
  sequence surrounding the exon-exon junction in a head-to-tail arrangement of bloodCirc_08659
cacatcaaactctggaggaggccaaattaaagaagcggaa

SEQ ID NO: 472 - DNA, 40 bp, Artificial Sequence
  sequence surrounding the exon-exon junction in a head-to-tail arrangement of bloodCirc_21499
ttaccaaaagacactttcagccaagttctatagaaatttt

SEQ ID NO: 473 - DNA, 40 bp, Artificial Sequence
  sequence surrounding the exon-exon junction in a head-to-tail arrangement of bloodCirc_14410
gtcactaagcagaaataaagaatgtgtgaatgacaactac

SEQ ID NO: 474 - DNA, 40 bp, Artificial Sequence
  sequence surrounding the exon-exon junction in a head-to-tail arrangement of bloodCirc_05272
acaacaagaaatagctgcagagatagaaagaagagaattg

SEQ ID NO: 475 - DNA, 40 bp, Artificial Sequence
  sequence surrounding the exon-exon junction in a head-to-tail arrangement of bloodCirc_20253
ttgtctcagggagcacagaatgaacagctctgcgcttttt

SEQ ID NO: 476 - DNA, 40 bp, Artificial Sequence
  sequence surrounding the exon-exon junction in a head-to-tail arrangement of bloodCirc_12867
taacaacaccttttgccaagtgtggcaaagcgctccctgg

SEQ ID NO: 477 - DNA, 40 bp, Artificial Sequence
  sequence surrounding the exon-exon junction in a head-to-tail arrangement of bloodCirc_18343
cagttaaaaatgttgcctaagaatacaggagtttccagaa

SEQ ID NO: 478 - DNA, 40 bp, Artificial Sequence
  sequence surrounding the exon-exon junction in a head-to-tail arrangement of bloodCirc_16491
aagtaatcaacgtaagagagaattcggttccctcaaaatt

SEQ ID NO: 479 - DNA, 40 bp, Artificial Sequence
  sequence surrounding the exon-exon junction in a head-to-tail arrangement of bloodCirc_23279
atgatgaagacattgatgatgataacaaagctgatgtaat

SEQ ID NO: 480 - DNA, 40 bp, Artificial Sequence
  sequence surrounding the exon-exon junction in a head-to-tail arrangement of bloodCirc_04762
cttggaatgctgcaacaatgtgatgtaaattggagtcaac

SEQ ID NO: 481 - DNA, 40 bp, Artificial Sequence
  sequence surrounding the exon-exon junction in a head-to-tail arrangement of bloodCirc_03534
gtggaaactaatgagaagaggtgaagtggatcctaaagag

SEQ ID NO: 482 - DNA, 40 bp, Artificial Sequence
  sequence surrounding the exon-exon junction in a head-to-tail arrangement of bloodCirc_12274
gagccgttcaaatccacaaggagctcttgaaacaacatca

SEQ ID NO: 483 - DNA, 40 bp, Artificial Sequence
  sequence surrounding the exon-exon junction in a head-to-tail arrangement of bloodCirc_17490
aagaaggatgctgttaaaagggccagctctcaatgttgca

SEQ ID NO: 484 - DNA, 40 bp, Artificial Sequence
  sequence surrounding the exon-exon junction in a head-to-tail arrangement of bloodCirc_07235
attgtcgcccatgttctcttataacatagatcatcagtag

SEQ ID NO: 485 - DNA, 40 bp, Artificial Sequence
  sequence surrounding the exon-exon junction in a head-to-tail arrangement of bloodCirc_00199
attacctatcaggagaggagggaagaggaagaacgtctga

SEQ ID NO: 486 - DNA, 40 bp, Artificial Sequence
  sequence surrounding the exon-exon junction in a head-to-tail arrangement of bloodCirc_01097
attttcaagcacagaaaaaggttcacatgatgctcttata

SEQ ID NO: 487 - DNA, 40 bp, Artificial Sequence
  sequence surrounding the exon-exon junction in a head-to-tail arrangement of bloodCirc_08154
aaatacagaaagaaattcagactgcaaatgaacactggac

SEQ ID NO: 488 - DNA, 40 bp, Artificial Sequence
  sequence surrounding the exon-exon junction in a head-to-tail arrangement of bloodCirc_01423
ttttcattagaaaccgcacagtagagtacagagagatgga

SEQ ID NO: 489 - DNA, 40 bp, Artificial Sequence
  sequence surrounding the exon-exon junction in a head-to-tail arrangement of bloodCirc_18273
ctacaaattcagtgaaagagaatatcctccgaatcctaaa

SEQ ID NO: 490 - DNA, 40 bp, Artificial Sequence
  sequence surrounding the exon-exon junction in a head-to-tail arrangement of bloodCirc_02982
gcattccatgttatttataggatactgctggtcaagagag

SEQ ID NO: 491 - DNA, 40 bp, Artificial Sequence
  sequence surrounding the exon-exon junction in a head-to-tail arrangement of bloodCirc_09356
ctgatggatttccaccaaagttaacttaccaagactggtt

SEQ ID NO: 492 - DNA, 40 bp, Artificial Sequence
  sequence surrounding the exon-exon junction in a head-to-tail arrangement of bloodCirc_02496
ctgagaattgtgtggccaaaaattcctcagagagagaaga

SEQ ID NO: 493 - DNA, 40 bp, Artificial Sequence
  sequence surrounding the exon-exon junction in a head-to-tail arrangement of bloodCirc_02437
atgcatactaccttgtactgcacagtgcctggctcatggt

SEQ ID NO: 494 - DNA, 40 bp, Artificial Sequence
  sequence surrounding the exon-exon junction in a head-to-tail arrangement of bloodCirc_14948
tggggaaaagtgcaatgcagtctacaaataagaaacctcg

SEQ ID NO: 495 - DNA, 40 bp, Artificial Sequence
  sequence surrounding the exon-exon junction in a head-to-tail arrangement of bloodCirc_16191
aaagtttcatcattccattagccctcagttatattaggag

SEQ ID NO: 496 - DNA, 40 bp, Artificial Sequence
  sequence surrounding the exon-exon junction in a head-to-tail arrangement of bloodCirc_00019
atgaatatgaacattatgaggtaatctatttaaagaagac

SEQ ID NO: 497 - DNA, 40 bp, Artificial Sequence
  sequence surrounding the exon-exon junction in a head-to-tail arrangement of bloodCirc_17405
aaccacctccaaaaaccaaggaactacataagggagaatg

SEQ ID NO: 498 - DNA, 40 bp, Artificial Sequence
  sequence surrounding the exon-exon junction in a head-to-tail arrangement of bloodCirc_05428
tatcttcccatcataaaaaattgatctcccttttgtgagg

SEQ ID NO: 499 - DNA, 40 bp, Artificial Sequence
  sequence surrounding the exon-exon junction in a head-to-tail arrangement of bloodCirc_15760
tcattaaaaagcagaaggagggctatggaacacacctgat

SEQ ID NO: 500 - DNA, 40 bp, Artificial Sequence
  sequence surrounding the exon-exon junction in a head-to-tail arrangement of bloodCirc_09205
tccgaaaatgtgagaataagactcctgtggaagaggtccc

SEQ ID NO: 501 - DNA, 40 bp, Artificial Sequence
  sequence surrounding the exon-exon junction in a head-to-tail arrangement of bloodCirc_14782
ccattttgtaattgcaggagtgaacagcagagaatttcaa

SEQ ID NO: 502 - DNA, 40 bp, Artificial Sequence
  sequence surrounding the exon-exon junction in a head-to-tail arrangement of bloodCirc_17376
tctgtgatgtcacactcaagtcacagcaaactgtacaatg

SEQ ID NO: 503 - DNA, 40 bp, Artificial Sequence
  sequence surrounding the exon-exon junction in a head-to-tail arrangement of bloodCirc_22074
ttaacaccctggagactcgggtcactgctgaaactcaaga

SEQ ID NO: 504 - DNA, 40 bp, Artificial Sequence
  sequence surrounding the exon-exon junction in a head-to-tail arrangement of bloodCirc_09111
agaagattcctctgacagtggagaggcacatgatcatgca

SEQ ID NO: 505 - DNA, 40 bp, Artificial Sequence
  sequence surrounding the exon-exon junction in a head-to-tail arrangement of bloodCirc_12648
tcttacatcagttcagagagtgaaaaatgtgaggttttac

SEQ ID NO: 506 - DNA, 40 bp, Artificial Sequence
  sequence surrounding the exon-exon junction in a head-to-tail arrangement of bloodCirc_11683
agttacagaaattcttggcagaaatcagaaaagttgtaca

SEQ ID NO: 507 - DNA, 40 bp, Artificial Sequence
  sequence surrounding the exon-exon junction in a head-to-tail arrangement of bloodCirc_04141
ctacaatctcggtactacaggtatggcctcacaagtcttg

SEQ ID NO: 508 - DNA, 40 bp, Artificial Sequence
  sequence surrounding the exon-exon junction in a head-to-tail arrangement of bloodCirc_02328
attcaaatggatcttcaaagggggattcccgaagtcttcc

SEQ ID NO: 509 - DNA, 40 bp, Artificial Sequence
  sequence surrounding the exon-exon junction in a head-to-tail arrangement of bloodCirc_17863
tgaagtcaagtatgtagcagctgatgttctaatcatgtca

SEQ ID NO: 510 - DNA, 40 bp, Artificial Sequence
  sequence surrounding the exon-exon junction in a head-to-tail arrangement of bloodCirc_16668
ttatgctactgtgttctcagaagtgtcattgttgcagcaa

SEQ ID NO: 511 - DNA, 40 bp, Artificial Sequence
  sequence surrounding the exon-exon junction in a head-to-tail arrangement of bloodCirc_23105
gacctatctgatgacaaaaagaagaaaatgaaaaaagaag

SEQ ID NO: 512 - DNA, 40 bp, Artificial Sequence
  sequence surrounding the exon-exon junction in a head-to-tail arrangement of bloodCirc_01954
cttctaaatctgttgatgaaaaatatggctacacacacct

SEQ ID NO: 513 - DNA, 40 bp, Artificial Sequence
  sequence surrounding the exon-exon junction in a head-to-tail arrangement of bloodCirc_08564
tgtcctcttctgaccaaagacttttaggtttgtttgaata

SEQ ID NO: 514 - DNA, 40 bp, Artificial Sequence
  sequence surrounding the exon-exon junction in a head-to-tail arrangement of bloodCirc_20352
ctcattcagtttgctactaggccagtctatccatatgggg

SEQ ID NO: 515 - DNA, 40 bp, Artificial Sequence
  sequence surrounding the exon-exon junction in a head-to-tail arrangement of bloodCirc_11008
tgagagaagctaaaagacagatcagcaatcgagtcctgta

SEQ ID NO: 516 - DNA, 40 bp, Artificial Sequence
  sequence surrounding the exon-exon junction in a head-to-tail arrangement of bloodCirc_22402
cagaagactggactgaagatacttcatgggagactgtagg

SEQ ID NO: 517 - DNA, 40 bp, Artificial Sequence
  sequence surrounding the exon-exon junction in a head-to-tail arrangement of bloodCirc_21830
tcagcaccttggaacctttggttcgagaacttgtcttgga

SEQ ID NO: 518 - DNA, 40 bp, Artificial Sequence
  sequence surrounding the exon-exon junction in a head-to-tail arrangement of bloodCirc_12329
gaaaaatatgaacacaaaagatttctcgaatgctggcagc

SEQ ID NO: 519 - DNA, 40 bp, Artificial Sequence
  sequence surrounding the exon-exon junction in a head-to-tail arrangement of bloodCirc_15468
tccaggacaaaaaggattagaacaagttgaaatcatcgca

SEQ ID NO: 520 - DNA, 40 bp, Artificial Sequence
  sequence surrounding the exon-exon junction in a head-to-tail arrangement of bloodCirc_04828
caactgtaggaagcaacagagatgacgctgtcagtataga

SEQ ID NO: 521 - DNA, 40 bp, Artificial Sequence
  sequence surrounding the exon-exon junction in a head-to-tail arrangement of bloodCirc_16490
gtgaattagtgaacactggaaattcggttccctcaaaatt

SEQ ID NO: 522 - DNA, 40 bp, Artificial Sequence
  sequence surrounding the exon-exon junction in a head-to-tail arrangement of bloodCirc_01030
ccagaaaacaaacccaagagagagaagattgaaaaagcat

SEQ ID NO: 523 - DNA, 40 bp, Artificial Sequence
  sequence surrounding the exon-exon junction in a head-to-tail arrangement of bloodCirc_19420
ctgaaattgaggaagaagagagactgtgcagttgatccaa

SEQ ID NO: 524 - DNA, 40 bp, Artificial Sequence
  sequence surrounding the exon-exon junction in a head-to-tail arrangement of bloodCirc_14185
tttactttaaaaccaccaaacacaacctccaagagggaaa

SEQ ID NO: 525 - DNA, 40 bp, Artificial Sequence
  sequence surrounding the exon-exon junction in a head-to-tail arrangement of bloodCirc_03718
ttttgaaacagaagaatctgagtgaaattcacatgtctga

SEQ ID NO: 526 - DNA, 40 bp, Artificial Sequence
  sequence surrounding the exon-exon junction in a head-to-tail arrangement of bloodCirc_09613
cctagttttgatgaaagcaggattctgttataataataga

SEQ ID NO: 527 - DNA, 40 bp, Artificial Sequence
  sequence surrounding the exon-exon junction in a head-to-tail arrangement of bloodCirc_06750
tcaaagacccattggaacaagtggtgatggcacttctcaa

SEQ ID NO: 528 - DNA, 40 bp, Artificial Sequence
  sequence surrounding the exon-exon junction in a head-to-tail arrangement of bloodCirc_01018
acatactatgtttttggcagggtgatcgagtgattcttgg

SEQ ID NO: 529 - DNA, 40 bp, Artificial Sequence
  sequence surrounding the exon-exon junction in a head-to-tail arrangement of bloodCirc_16470
ttagcagttgaaaggggcaggggcctgaattaatgaataa

SEQ ID NO: 530 - DNA, 40 bp, Artificial Sequence
  sequence surrounding the exon-exon junction in a head-to-tail arrangement of bloodCirc_09778
gaagaagacagcagcaaaaagtacaaagacaaagaaacaa

SEQ ID NO: 531 - DNA, 40 bp, Artificial Sequence
  sequence surrounding the exon-exon junction in a head-to-tail arrangement of bloodCirc_05143
actgcatctgttcatatgagtgctactcattgagtttcct

SEQ ID NO: 532 - DNA, 40 bp, Artificial Sequence
  sequence surrounding the exon-exon junction in a head-to-tail arrangement of bloodCirc_06260
gtcagcaacaaagaaaactggtatccacaaattacccatt

SEQ ID NO: 533 - DNA, 40 bp, Artificial Sequence
  sequence surrounding the exon-exon junction in a head-to-tail arrangement of bloodCirc_22228
ccgcgcctagaccccattcaactgggccagtgccattcgc

SEQ ID NO: 534 - DNA, 40 bp, Artificial Sequence
  sequence surrounding the exon-exon junction in a head-to-tail arrangement of bloodCirc_13448
tattctgctgatttttcagggtcaactttgtagtgtgcca

SEQ ID NO: 535 - DNA, 40 bp, Artificial Sequence
  sequence surrounding the exon-exon junction in a head-to-tail arrangement of bloodCirc_15357
gaatgattcagacttgcaaggtgattgaagatagtactgg

SEQ ID NO: 536 - DNA, 40 bp, Artificial Sequence
  sequence surrounding the exon-exon junction in a head-to-tail arrangement of bloodCirc_09002
agcacagagctacattcgaggtctcttttattcaaaacct

SEQ ID NO: 537 - DNA, 40 bp, Artificial Sequence
  sequence surrounding the exon-exon junction in a head-to-tail arrangement of bloodCirc_06393
cctccacaggggagacagagaattctgcttggtcagaatc

SEQ ID NO: 538 - DNA, 40 bp, Artificial Sequence
  sequence surrounding the exon-exon junction in a head-to-tail arrangement of bloodCirc_13458
ggagtggagaacatgcacaagctcaaaccaccaaaggtcc

SEQ ID NO: 539 - DNA, 40 bp, Artificial Sequence
  sequence surrounding the exon-exon junction in a head-to-tail arrangement of bloodCirc_16825
aggtcttaatgacagatcagcatatgctactttgattgaa

SEQ ID NO: 540 - DNA, 40 bp, Artificial Sequence
  sequence surrounding the exon-exon junction in a head-to-tail arrangement of bloodCirc_23126
aatgaaatcgccaagaagcggaaaaatccaagctggagag

SEQ ID NO: 541 - DNA, 40 bp, Artificial Sequence
  sequence surrounding the exon-exon junction in a head-to-tail arrangement of bloodCirc_20269
aacctttagatgaatttacatgaacttgaagatgatttac

SEQ ID NO: 542 - DNA, 40 bp, Artificial Sequence
  sequence surrounding the exon-exon junction in a head-to-tail arrangement of bloodCirc_09112
agaagattcctctgacagtgaataccatggcaagacatgc

SEQ ID NO: 543 - DNA, 40 bp, Artificial Sequence
  sequence surrounding the exon-exon junction in a head-to-tail arrangement of bloodCirc_06268
aatgcgaggaataataaaagtacacgagcaagaagccatt

SEQ ID NO: 544 - DNA, 40 bp, Artificial Sequence
  sequence surrounding the exon-exon junction in a head-to-tail arrangement of bloodCirc_16155
ccagtggaggaaagagctaggtcaatatagtctatattta

SEQ ID NO: 545 - DNA, 40 bp, Artificial Sequence
  sequence surrounding the exon-exon junction in a head-to-tail arrangement of bloodCirc_17913
ctctgggagagaataaaaaggaagaagagattaaatctct

SEQ ID NO: 546 - DNA, 40 bp, Artificial Sequence
  sequence surrounding the exon-exon junction in a head-to-tail arrangement of bloodCirc_04638
atacagctgctattaggcagctctgttagaacaaggcaat

SEQ ID NO: 547 - DNA, 40 bp, Artificial Sequence
  sequence surrounding the exon-exon junction in a head-to-tail arrangement of bloodCirc_02840
tcaccgtattttttgccaagggtttgtgtttagtgaatca

SEQ ID NO: 548 - DNA, 40 bp, Artificial Sequence
  sequence surrounding the exon-exon junction in a head-to-tail arrangement of bloodCirc_07667
aagcaaaaacaataacaaagtgaaaatgcctcgtgtaaaa

SEQ ID NO: 549 - DNA, 40 bp, Artificial Sequence
  sequence surrounding the exon-exon junction in a head-to-tail arrangement of bloodCirc_02854
taatcaggaactcagaaaagtttagcaattggagtcgtgt

SEQ ID NO: 550 - DNA, 40 bp, Artificial Sequence
  sequence surrounding the exon-exon junction in a head-to-tail arrangement of bloodCirc_19975
aaatttaaaattaatggatggaacaagcagcaggagctaa

SEQ ID NO: 551 - DNA, 40 bp, Artificial Sequence
  sequence surrounding the exon-exon junction in a head-to-tail arrangement of bloodCirc_03181
gggtgtgtaataaaatacagcgtgacgacagcatgtacga

SEQ ID NO: 552 - DNA, 40 bp, Artificial Sequence
  sequence surrounding the exon-exon junction in a head-to-tail arrangement of bloodCirc_15801
agttcacatactatttatgggtttaactatagatcaacac

SEQ ID NO: 553 - DNA, 40 bp, Artificial Sequence
  sequence surrounding the exon-exon junction in a head-to-tail arrangement of bloodCirc_20062
ttgtcgattcattaaaataggaacattttagtggacaaac

SEQ ID NO: 554 - DNA, 40 bp, Artificial Sequence
  sequence surrounding the exon-exon junction in a head-to-tail arrangement of bloodCirc_09831
gacacccttttctcaaaaagctggacacctgttctgctgt

SEQ ID NO: 555 - DNA, 40 bp, Artificial Sequence
  sequence surrounding the exon-exon junction in a head-to-tail arrangement of bloodCirc_03697
ttatgagaatggcatctaagaatgaagaccagcaagaagt

SEQ ID NO: 556 - DNA, 40 bp, Artificial Sequence
  sequence surrounding the exon-exon junction in a head-to-tail arrangement of bloodCirc_15598
tttctttctgtttttgcgaggtaccagcaacttcaaggtt

SEQ ID NO: 557 - DNA, 40 bp, Artificial Sequence
  sequence surrounding the exon-exon junction in a head-to-tail arrangement of bloodCirc_06663
gataacagatcacctcaaaagtacgtcagcctgtcatatg

SEQ ID NO: 558 - DNA, 40 bp, Artificial Sequence
  sequence surrounding the exon-exon junction in a head-to-tail arrangement of bloodCirc_22473
tgcaaagtggattttataagaataactacaaaacaaaatt

SEQ ID NO: 559 - DNA, 40 bp, Artificial Sequence
  sequence surrounding the exon-exon junction in a head-to-tail arrangement of bloodCirc_15073
atggtttagatgctgacttggtcagcaaaggaggcagaag

SEQ ID NO: 560 - DNA, 40 bp, Artificial Sequence
  sequence surrounding the exon-exon junction in a head-to-tail arrangement of bloodCirc_00198
acaaccttgatttcagtgtgggaagaggaagaacgtctga

SEQ ID NO: 561 - DNA, 40 bp, Artificial Sequence
  sequence surrounding the exon-exon junction in a head-to-tail arrangement of bloodCirc_13616
tcagccttttcacgctcaaggtattagaaaactactcgga

SEQ ID NO: 562 - DNA, 40 bp, Artificial Sequence
  sequence surrounding the exon-exon junction in a head-to-tail arrangement of bloodCirc_00912
tctaccttgtccagtaaaaggtgctcaaaaaacatttgtt

SEQ ID NO: 563 - DNA, 40 bp, Artificial Sequence
  sequence surrounding the exon-exon junction in a head-to-tail arrangement of bloodCirc_17336
ctttgaaatcgccaaataagattgctaagaagcctcgaac

SEQ ID NO: 564 - DNA, 40 bp, Artificial Sequence
  sequence surrounding the exon-exon junction in a head-to-tail arrangement of bloodCirc_09814
atttgaggagaaagcatttgatttggaacattgctaccaa

SEQ ID NO: 565 - DNA, 40 bp, Artificial Sequence
  sequence surrounding the exon-exon junction in a head-to-tail arrangement of bloodCirc_21876
agatgcaacgagtgcacttggtgaaagcactgaaagagaa

SEQ ID NO: 566 - DNA, 40 bp, Artificial Sequence
  sequence surrounding the exon-exon junction in a head-to-tail arrangement of bloodCirc_21373
tatttgccagagcacatctgctttgattagtttgtccttt

SEQ ID NO: 567 - DNA, 40 bp, Artificial Sequence
  sequence surrounding the exon-exon junction in a head-to-tail arrangement of bloodCirc_19233
tgaaacagatttgcaaaaagaaaagagtctcatcgtggaa

SEQ ID NO: 568 - DNA, 40 bp, Artificial Sequence
  sequence surrounding the exon-exon junction in a head-to-tail arrangement of bloodCirc_11803
ctgtacttgttccaactcaagtgctatacttggtagatca

SEQ ID NO: 569 - DNA, 40 bp, Artificial Sequence
  sequence surrounding the exon-exon junction in a head-to-tail arrangement of bloodCirc_03038
agaaaactacatgaacttacagaaagtccatgaaatggaa

SEQ ID NO: 570 - DNA, 40 bp, Artificial Sequence
  sequence surrounding the exon-exon junction in a head-to-tail arrangement of bloodCirc_22414
caagcgagcccggggtagagattttctattttgtacatac

SEQ ID NO: 571 - DNA, 40 bp, Artificial Sequence
  sequence surrounding the exon-exon junction in a head-to-tail arrangement of bloodCirc_00555
attatggaactacttatgaggaagaagagaatttatccaa

SEQ ID NO: 572 - DNA, 40 bp, Artificial Sequence
  sequence surrounding the exon-exon junction in a head-to-tail arrangement of bloodCirc_12529
agccagcctctgggaccgaggttcagccgtctgtatatct

SEQ ID NO: 573 - DNA, 40 bp, Artificial Sequence
  sequence surrounding the exon-exon junction in a head-to-tail arrangement of bloodCirc_08578
acctttctaagaagtccaagaataagagtaagagcctgaa

SEQ ID NO: 574 - DNA, 40 bp, Artificial Sequence
  sequence surrounding the exon-exon junction in a head-to-tail arrangement of bloodCirc_05946
attatgacactagtgattttatgctgcacttaaaaggatg

SEQ ID NO: 575 - DNA, 40 bp, Artificial Sequence
  sequence surrounding the exon-exon junction in a head-to-tail arrangement of bloodCirc_10124
atgatgaactaatttccaaggctgctgagaactagcccta

SEQ ID NO: 576 - DNA, 40 bp, Artificial Sequence
  sequence surrounding the exon-exon junction in a head-to-tail arrangement of bloodCirc_18352
aagccaaaaagttagaaaaggcaagaagatgaaaatttta

SEQ ID NO: 577 - DNA, 40 bp, Artificial Sequence
  sequence surrounding the exon-exon junction in a head-to-tail arrangement of bloodCirc_18457
aatgcacagcttgtgttcagaaaaggaaccagtgatttac

SEQ ID NO: 578 - DNA, 40 bp, Artificial Sequence
  sequence surrounding the exon-exon junction in a head-to-tail arrangement of bloodCirc_12608
aaggctggaggaaacgtcagtactcgggtttcatattttg

SEQ ID NO: 579 - DNA, 40 bp, Artificial Sequence
  sequence surrounding the exon-exon junction in a head-to-tail arrangement of bloodCirc_20565
caagagtgacagagtcgtggataacctgaggaccatggat

SEQ ID NO: 580 - DNA, 40 bp, Artificial Sequence
  sequence surrounding the exon-exon junction in a head-to-tail arrangement of bloodCirc_18886
ctcacttttggagatagcaggaggaattaattccaatgag

SEQ ID NO: 581 - DNA, 40 bp, Artificial Sequence
  sequence surrounding the exon-exon junction in a head-to-tail arrangement of bloodCirc_06726
agaggaaatgtatgatgaagctcaaatctaatccaagtga

SEQ ID NO: 582 - DNA, 40 bp, Artificial Sequence
  sequence surrounding the exon-exon junction in a head-to-tail arrangement of bloodCirc_11894
cattattgggaaatgtcaagcctagaggcaaccaaaaaca

SEQ ID NO: 583 - DNA, 40 bp, Artificial Sequence
  sequence surrounding the exon-exon junction in a head-to-tail arrangement of bloodCirc_08083
agttgtcttcagtagaaaggaggtctgttaccatctgaag

SEQ ID NO: 584 - DNA, 40 bp, Artificial Sequence
  sequence surrounding the exon-exon junction in a head-to-tail arrangement of bloodCirc_01398
tctgcactagaagcaagcagagccttagatcgtctgtcag

SEQ ID NO: 585 - DNA, 40 bp, Artificial Sequence
  sequence surrounding the exon-exon junction in a head-to-tail arrangement of bloodCirc_00433
tcaagaactggaagaattgggcatcctgacaaaaacaaag

SEQ ID NO: 586 - DNA, 40 bp, Artificial Sequence
  sequence surrounding the exon-exon junction in a head-to-tail arrangement of bloodCirc_15074
cagcgtgggaggcgttttagattcctgaatttgacaactt

SEQ ID NO: 587 - DNA, 40 bp, Artificial Sequence
  sequence surrounding the exon-exon junction in a head-to-tail arrangement of bloodCirc_16004
gatctcgtaagaaggattcagaacacctttgtcctagaat

SEQ ID NO: 588 - DNA, 40 bp, Artificial Sequence
  sequence surrounding the exon-exon junction in a head-to-tail arrangement of bloodCirc_18658
ttttaaaaacaccaggaaagaaaaaatgcctgtcttaaag

SEQ ID NO: 589 - DNA, 40 bp, Artificial Sequence
  sequence surrounding the exon-exon junction in a head-to-tail arrangement of bloodCirc_14519
ccatcatgctaacttcccacatttggagcaagaggtggtg

SEQ ID NO: 590 - DNA, 40 bp, Artificial Sequence
  sequence surrounding the exon-exon junction in a head-to-tail arrangement of bloodCirc_13180
aattttcaagggaaggacagactgcagttcgtcatgaatc

SEQ ID NO: 591 - DNA, 40 bp, Artificial Sequence
  sequence surrounding the exon-exon junction in a head-to-tail arrangement of bloodCirc_00915
tctaccttgtccagtaaaagggtcagatgaaagtgagatc

SEQ ID NO: 592 - DNA, 40 bp, Artificial Sequence
  sequence surrounding the exon-exon junction in a head-to-tail arrangement of bloodCirc_10135
acacctttctgctttatctgctcctcaagagttactgatc

SEQ ID NO: 593 - DNA, 40 bp, Artificial Sequence
  sequence surrounding the exon-exon junction in a head-to-tail arrangement of bloodCirc_11374
gaggaagagctgccgagacgggtaaaaaagatacagtaaa

SEQ ID NO: 594 - DNA, 40 bp, Artificial Sequence
  sequence surrounding the exon-exon junction in a head-to-tail arrangement of bloodCirc_18196
gagcaaggcaaaaaagtcaggcaatgaatcgctccctggc

SEQ ID NO: 595 - DNA, 40 bp, Artificial Sequence
  sequence surrounding the exon-exon junction in a head-to-tail arrangement of bloodCirc_12283
atatgtttcgtacgtatcagggagctcaaagaggcccatg

SEQ ID NO: 596 - DNA, 40 bp, Artificial Sequence
  sequence surrounding the exon-exon junction in a head-to-tail arrangement of bloodCirc_01405
atttttcaacaatgcttcagagtcatcctttttgaacttc

SEQ ID NO: 597 - DNA, 40 bp, Artificial Sequence
  sequence surrounding the exon-exon junction in a head-to-tail arrangement of bloodCirc_03492
gcagttgaacagaaacaaagatatggagtttggacctcca

SEQ ID NO: 598 - DNA, 40 bp, Artificial Sequence
  sequence surrounding the exon-exon junction in a head-to-tail arrangement of bloodCirc_03880
taatattgccaaatacacagttcagcggaccaggagagga

SEQ ID NO: 599 - DNA, 40 bp, Artificial Sequence
  sequence surrounding the exon-exon junction in a head-to-tail arrangement of bloodCirc_15092
caattaagtaacaacgtgagagttttccgtctgatgaagg

SEQ ID NO: 600 - DNA, 40 bp, Artificial Sequence
  sequence surrounding the exon-exon junction in a head-to-tail arrangement of bloodCirc_14257
cagcctaacaaaagtatcaggatgatagtgatcttcctaa

SEQ ID NO: 601 - DNA, 40 bp, Artificial Sequence
  sequence surrounding the exon-exon junction in a head-to-tail arrangement of bloodCirc_01241
atgtcaacaagaacagtaagaatcctgaggttggcttgaa

SEQ ID NO: 602 - DNA, 40 bp, Artificial Sequence
  sequence surrounding the exon-exon junction in a head-to-tail arrangement of bloodCirc_20408
ataccattactcctcaacagcaatgcagcaagtcttggaa

SEQ ID NO: 603 - DNA, 40 bp, Artificial Sequence
  sequence surrounding the exon-exon junction in a head-to-tail arrangement of bloodCirc_18316
gaagtgttaaaaagaaaaagctatcattgttaattatgca

SEQ ID NO: 604 - DNA, 40 bp, Artificial Sequence
  sequence surrounding the exon-exon junction in a head-to-tail arrangement of bloodCirc_20268
attcagagataagcttaaagtgaacttgaagatgatttac

SEQ ID NO: 605 - DNA, 40 bp, Artificial Sequence
  sequence surrounding the exon-exon junction in a head-to-tail arrangement of bloodCirc_02266
aattggaaatttttattcgggtggacactatatagcctac

SEQ ID NO: 606 - DNA, 40 bp, Artificial Sequence
  sequence surrounding the exon-exon junction in a head-to-tail arrangement of bloodCirc_05793
tcatgaactcagctattcaggtggttgaacagggtatgtt

SEQ ID NO: 607 - DNA, 40 bp, Artificial Sequence
  sequence surrounding the exon-exon junction in a head-to-tail arrangement of bloodCirc_05179
tggatttatttatttttcaggctgaactcacgggaatcaa

SEQ ID NO: 608 - DNA, 40 bp, Artificial Sequence
  sequence surrounding the exon-exon junction in a head-to-tail arrangement of bloodCirc_05174
tatcacagtgcacctgaaaagctgaactcacgggaatcaa

SEQ ID NO: 609 - DNA, 40 bp, Artificial Sequence
  sequence surrounding the exon-exon junction in a head-to-tail arrangement of bloodCirc_22708
aagaattccagtcttataaaattatctgcaattatgaaat

SEQ ID NO: 610 - DNA, 40 bp, Artificial Sequence
  sequence surrounding the exon-exon junction in a head-to-tail arrangement of bloodCirc_20391
tgcttctatggcaggatatgagttaatagagtggatacaa

SEQ ID NO: 611 - DNA, 40 bp, Artificial Sequence
  sequence surrounding the exon-exon junction in a head-to-tail arrangement of bloodCirc_11362
gccttgagcacgagcggcaggagtgggaggagcggcgcag

SEQ ID NO: 612 - DNA, 40 bp, Artificial Sequence
  sequence surrounding the exon-exon junction in a head-to-tail arrangement of bloodCirc_15121
gggaacgattaatctggcagcagtaaaagagaactctgtt

SEQ ID NO: 613 - DNA, 40 bp, Artificial Sequence
  sequence surrounding the exon-exon junction in a head-to-tail arrangement of bloodCirc_02629
gttagaccttccagaacctggcttttttgtccaaggtttt

SEQ ID NO: 614 - DNA, 40 bp, Artificial Sequence
  sequence surrounding the exon-exon junction in a head-to-tail arrangement of bloodCirc_15583
aaatgataaattttcacacaggcagctttggaagaagtag

SEQ ID NO: 615 - DNA, 40 bp, Artificial Sequence
  sequence surrounding the exon-exon junction in a head-to-tail arrangement of bloodCirc_07647
attaggagtgcatacaaaagtccagttacaacacagggat

SEQ ID NO: 616 - DNA, 40 bp, Artificial Sequence
  sequence surrounding the exon-exon junction in a head-to-tail arrangement of bloodCirc_12697
gaattttgtagaaggagaaggttttagctaaagaagatac

SEQ ID NO: 617 - DNA, 40 bp, Artificial Sequence
  sequence surrounding the exon-exon junction in a head-to-tail arrangement of bloodCirc_09124
ggccacacccctatatttcgatcttgagccagatgattgt

SEQ ID NO: 618 - DNA, 40 bp, Artificial Sequence
  sequence surrounding the exon-exon junction in a head-to-tail arrangement of bloodCirc_01967
tcatcatctagtcatgctgggagagattaaacagattcta

SEQ ID NO: 619 - DNA, 40 bp, Artificial Sequence
  sequence surrounding the exon-exon junction in a head-to-tail arrangement of bloodCirc_09438
ctatcaaagaaaattgcagagaggaattttgttgtcagag

SEQ ID NO: 620 - DNA, 40 bp, Artificial Sequence
  sequence surrounding the exon-exon junction in a head-to-tail arrangement of bloodCirc_06838
acagactcacggccagcgaagtgagttcccagagaacggg

SEQ ID NO: 621 - DNA, 40 bp, Artificial Sequence
  sequence surrounding the exon-exon junction in a head-to-tail arrangement of bloodCirc_01695
aaatccccacaggagaaggacaagagcagtatgaaagtac

SEQ ID NO: 622 - DNA, 40 bp, Artificial Sequence
  sequence surrounding the exon-exon junction in a head-to-tail arrangement of bloodCirc_06864
agtcctccacttgccactggatctgacaggatggcatctg

SEQ ID NO: 623 - DNA, 40 bp, Artificial Sequence
  sequence surrounding the exon-exon junction in a head-to-tail arrangement of bloodCirc_00645
cagataatttaaaaaatgaggcttcccagctggcgtgtat

SEQ ID NO: 624 - DNA, 40 bp, Artificial Sequence
  sequence surrounding the exon-exon junction in a head-to-tail arrangement of bloodCirc_02169
ctgccaagtttcacagccgggtgcctcatctccagacatg

SEQ ID NO: 625 - DNA, 40 bp, Artificial Sequence
  sequence surrounding the exon-exon junction in a head-to-tail arrangement of bloodCirc_01429
ttggaagcgaatcccccaagatggtaaatttgaaagagaa

SEQ ID NO: 626 - DNA, 40 bp, Artificial Sequence
  sequence surrounding the exon-exon junction in a head-to-tail arrangement of bloodCirc_22699
agcttgttgatgattttcagtggatgacgtagtagatgaa

SEQ ID NO: 627 - DNA, 40 bp, Artificial Sequence
  sequence surrounding the exon-exon junction in a head-to-tail arrangement of bloodCirc_05351
ggagagaatacacagagccaattacaggaccagataacaa

SEQ ID NO: 628 - DNA, 40 bp, Artificial Sequence
  sequence surrounding the exon-exon junction in a head-to-tail arrangement of bloodCirc_18039
agtgcagaggtttttttctgtttgtttcgacgccggaccg

SEQ ID NO: 629 - DNA, 40 bp, Artificial Sequence
  sequence surrounding the exon-exon junction in a head-to-tail arrangement of bloodCirc_13457
ggagtggagaacatgcacaagtcaactttgtagtgtgcca

SEQ ID NO: 630 - DNA, 40 bp, Artificial Sequence
  sequence surrounding the exon-exon junction in a head-to-tail arrangement of bloodCirc_07460
acaaccacctgagcaatactacctaatctgggagcctgca

SEQ ID NO: 631 - DNA, 40 bp, Artificial Sequence
  sequence surrounding the exon-exon junction in a head-to-tail arrangement of bloodCirc_06725
aagatgattttaaaaaagtgatggtgaccctgataactat

SEQ ID NO: 632 - DNA, 40 bp, Artificial Sequence
  sequence surrounding the exon-exon junction in a head-to-tail arrangement of bloodCirc_20409
atttggaactacggtgccatcaatgcagcaagtcttggaa

SEQ ID NO: 633 - DNA, 40 bp, Artificial Sequence
  sequence surrounding the exon-exon junction in a head-to-tail arrangement of bloodCirc_16349
cacattttccccaatatatggattcttactacagatttaa

SEQ ID NO: 634 - DNA, 40 bp, Artificial Sequence
  sequence surrounding the exon-exon junction in a head-to-tail arrangement of bloodCirc_12976
cttggaatcacgggttgaagggaagtcgagataacatgag

SEQ ID NO: 635 - DNA, 40 bp, Artificial Sequence
  sequence surrounding the exon-exon junction in a head-to-tail arrangement of bloodCirc_05296
aagaggttgctagcttacagggcaaggcctggagaatgtc

SEQ ID NO: 636 - DNA, 40 bp, Artificial Sequence
  sequence surrounding the exon-exon junction in a head-to-tail arrangement of bloodCirc_13459
ggagtggagaacatgcacaagctgcccgccacatgattcc

SEQ ID NO: 637 - DNA, 40 bp, Artificial Sequence
  sequence surrounding the exon-exon junction in a head-to-tail arrangement of bloodCirc_06911
ctacacagttcataaaacagaatctacctgttactcgtat

SEQ ID NO: 638 - DNA, 40 bp, Artificial Sequence
  sequence surrounding the exon-exon junction in a head-to-tail arrangement of bloodCirc_02265
aattggaaatttttattcgggaagagcagcgaagaggcac

SEQ ID NO: 639 - DNA, 40 bp, Artificial Sequence
  sequence surrounding the exon-exon junction in a head-to-tail arrangement of bloodCirc_12279
acttcattcaagagaaggaggacagtatttatgatgaaat

SEQ ID NO: 640 - DNA, 40 bp, Artificial Sequence
  sequence surrounding the exon-exon junction in a head-to-tail arrangement of bloodCirc_00882
attcttgaaggaattcaaagctaataaggcagtggatttt

SEQ ID NO: 641 - DNA, 40 bp, Artificial Sequence
  sequence surrounding the exon-exon junction in a head-to-tail arrangement of bloodCirc_21702
gggatatgatgacaaaaatgatatgtgtacttcctgataa

SEQ ID NO: 642 - DNA, 40 bp, Artificial Sequence
  sequence surrounding the exon-exon junction in a head-to-tail arrangement of bloodCirc_06790
caagatctaaatttagacagctcttcagagaagtaagaat

SEQ ID NO: 643 - DNA, 40 bp, Artificial Sequence
  sequence surrounding the exon-exon junction in a head-to-tail arrangement of bloodCirc_06499
gaaaagagagacaagccaagaaagaatcttcaagagggag

SEQ ID NO: 644 - DNA, 40 bp, Artificial Sequence
  sequence surrounding the exon-exon junction in a head-to-tail arrangement of bloodCirc_19179
caatgagggataaaaaaaagaaattagcagagtacggaaa

SEQ ID NO: 645 - DNA, 40 bp, Artificial Sequence
  sequence surrounding the exon-exon junction in a head-to-tail arrangement of bloodCirc_15650
gacttcaccggcaccatcaatttggtggagaaccattgtc

SEQ ID NO: 646 - DNA, 40 bp, Artificial Sequence
  sequence surrounding the exon-exon junction in a head-to-tail arrangement of bloodCirc_20947
ctggcaggcaacaccttagggttacgagaagtttctgaga

SEQ ID NO: 647 - DNA, 40 bp, Artificial Sequence
  sequence surrounding the exon-exon junction in a head-to-tail arrangement of bloodCirc_04013
tcctgcagcaacagatccaggtacacctgagagcctggca

SEQ ID NO: 648 - DNA, 40 bp, Artificial Sequence
  sequence surrounding the exon-exon junction in a head-to-tail arrangement of bloodCirc_06935
aagggacaagaaataaaaaggcccggattgcatttctaca

SEQ ID NO: 649 - DNA, 40 bp, Artificial Sequence
  sequence surrounding the exon-exon junction in a head-to-tail arrangement of bloodCirc_11737
aaaagaaccaagccgagaaggatctgcccaataacatgat

SEQ ID NO: 650 - DNA, 40 bp, Artificial Sequence
  sequence surrounding the exon-exon junction in a head-to-tail arrangement of bloodCirc_02879
ctggtgtttctggttctcaggataaaatggaccagttgct

SEQ ID NO: 651 - DNA, 40 bp, Artificial Sequence
  sequence surrounding the exon-exon junction in a head-to-tail arrangement of bloodCirc_20719
ctgacaacatgatttgtgctgcctgatcaaccccgtataa

SEQ ID NO: 652 - DNA, 40 bp, Artificial Sequence
  sequence surrounding the exon-exon junction in a head-to-tail arrangement of bloodCirc_17108
atggttctatgaatatgcagattttcagctgaactctcat

SEQ ID NO: 653 - DNA, 40 bp, Artificial Sequence
  sequence surrounding the exon-exon junction in a head-to-tail arrangement of bloodCirc_21844
acttctctctcctagtgaatgagcatttcatactactgaa

SEQ ID NO: 654 - DNA, 40 bp, Artificial Sequence
  sequence surrounding the exon-exon junction in a head-to-tail arrangement of bloodCirc_12598
acgtcaacaacagttttacgaccatcatcaaagaggggat

SEQ ID NO: 655 - DNA, 40 bp, Artificial Sequence
  sequence surrounding the exon-exon junction in a head-to-tail arrangement of bloodCirc_00556
attatggaactacttatgaggttaatacaatctgttggaa

SEQ ID NO: 656 - DNA, 40 bp, Artificial Sequence
  sequence surrounding the exon-exon junction in a head-to-tail arrangement of bloodCirc_19977
ttggttgctgatttccaaagacagtaaggattgtatcctg

SEQ ID NO: 657 - DNA, 40 bp, Artificial Sequence
  sequence surrounding the exon-exon junction in a head-to-tail arrangement of bloodCirc_02334
caaaccagcagcactaacaggatcggaaactccatggtac

SEQ ID NO: 658 - DNA, 40 bp, Artificial Sequence
  sequence surrounding the exon-exon junction in a head-to-tail arrangement of bloodCirc_17522
cttaaagaagaaataaccagaagtcaacgaaaggttccgt

SEQ ID NO: 659 - DNA, 40 bp, Artificial Sequence
  sequence surrounding the exon-exon junction in a head-to-tail arrangement of bloodCirc_06933
aagggacaagaaataaaaagaagaaaccaaagacacagag

SEQ ID NO: 660 - DNA, 40 bp, Artificial Sequence
  sequence surrounding the exon-exon junction in a head-to-tail arrangement of bloodCirc_05228
ccatcccattcatctaggagcgcatttgtagccatgaagt

SEQ ID NO: 661 - DNA, 40 bp, Artificial Sequence
  sequence surrounding the exon-exon junction in a head-to-tail arrangement of bloodCirc_19200
ttattgaagcaagactaaagtactatactggcaattgctg

SEQ ID NO: 662 - DNA, 40 bp, Artificial Sequence
  sequence surrounding the exon-exon junction in a head-to-tail arrangement of bloodCirc_20976
aagaagatccaactaacactaaatgagagataaaatgaga

SEQ ID NO: 663 - DNA, 40 bp, Artificial Sequence
  sequence surrounding the exon-exon junction in a head-to-tail arrangement of bloodCirc_21101
tgaccatctcacatgccacatttctttcaagatggcttga

SEQ ID NO: 664 - DNA, 40 bp, Artificial Sequence
  sequence surrounding the exon-exon junction in a head-to-tail arrangement of bloodCirc_20069
gattgaaaaggctgtaaatgtacttgattctaaagctcga

SEQ ID NO: 665 - DNA, 40 bp, Artificial Sequence
  sequence surrounding the exon-exon junction in a head-to-tail arrangement of bloodCirc_14335
aagagaacacgagcttgaaggttgagttgttacaacaaaa

SEQ ID NO: 666 - DNA, 40 bp, Artificial Sequence
  sequence surrounding the exon-exon junction in a head-to-tail arrangement of bloodCirc_04811
agttcctcaaagttgcagagacttaattcagtgcacaaat

SEQ ID NO: 667 - DNA, 40 bp, Artificial Sequence
  sequence surrounding the exon-exon junction in a head-to-tail arrangement of bloodCirc_11938
caagagaaaaactaccaaagacctgtcatttactccatcc

SEQ ID NO: 668 - DNA, 40 bp, Artificial Sequence
  sequence surrounding the exon-exon junction in a head-to-tail arrangement of bloodCirc_12288
accagtctgcccagaaattgcaagagcctcctgatctagc

SEQ ID NO: 669 - DNA, 40 bp, Artificial Sequence
  sequence surrounding the exon-exon junction in a head-to-tail arrangement of bloodCirc_15165
ggctcctgatccgaatttgggatgaacttactgctgtgaa

SEQ ID NO: 670 - DNA, 40 bp, Artificial Sequence
  sequence surrounding the exon-exon junction in a head-to-tail arrangement of bloodCirc_20975
gtcgggatgacttggcattgaaatgagagataaaatgaga

SEQ ID NO: 671 - DNA, 40 bp, Artificial Sequence
  sequence surrounding the exon-exon junction in a head-to-tail arrangement of bloodCirc_08355
agaatctcaataacagtatgatgtaaccttctgtaatgga

SEQ ID NO: 672 - DNA, 40 bp, Artificial Sequence
  sequence surrounding the exon-exon junction in a head-to-tail arrangement of bloodCirc_09860
aacccgaaaatccttccttggagcctacaagaaagtacga

SEQ ID NO: 673 - DNA, 40 bp, Artificial Sequence
  sequence surrounding the exon-exon junction in a head-to-tail arrangement of bloodCirc_05579
aagaacgctaccttttcttagagactaatgagcaaaaact

SEQ ID NO: 674 - DNA, 40 bp, Artificial Sequence
  sequence surrounding the exon-exon junction in a head-to-tail arrangement of bloodCirc_01085
taagcccccaatatgtgaaatcctggaacgttctccccat

SEQ ID NO: 675 - DNA, 40 bp, Artificial Sequence
  sequence surrounding the exon-exon junction in a head-to-tail arrangement of bloodCirc_02595
agaaaaccttcatgcctaaggtgaccaagtcagccatcgg

SEQ ID NO: 676 - DNA, 40 bp, Artificial Sequence
  sequence surrounding the exon-exon junction in a head-to-tail arrangement of bloodCirc_06256
caagattctgctgtgcacagaatcgcatgtgtgagtgccc

SEQ ID NO: 677 - DNA, 40 bp, Artificial Sequence
  sequence surrounding the exon-exon junction in a head-to-tail arrangement of bloodCirc_04491
agtgcgatttggtgaaggaaataggaaaagagtccaggag

SEQ ID NO: 678 - DNA, 40 bp, Artificial Sequence
  sequence surrounding the exon-exon junction in a head-to-tail arrangement of bloodCirc_21280
gaatactggaaaacccacaggcagacaccacccatccttt

SEQ ID NO: 679 - DNA, 40 bp, Artificial Sequence
  sequence surrounding the exon-exon junction in a head-to-tail arrangement of bloodCirc_19230
tgaaacagatttgcaaaaagccaccaaaaaagacagccaa

SEQ ID NO: 680 - DNA, 40 bp, Artificial Sequence
  sequence surrounding the exon-exon junction in a head-to-tail arrangement of bloodCirc_02255
aggctaggtattcctgacaggatcaagcagaacaattctt

SEQ ID NO: 681 - DNA, 40 bp, Artificial Sequence
  sequence surrounding the exon-exon junction in a head-to-tail arrangement of bloodCirc_10689
tcatctttggaaatgaacagataccaaacttgccagtagg

SEQ ID NO: 682 - DNA, 40 bp, Artificial Sequence
  sequence surrounding the exon-exon junction in a head-to-tail arrangement of bloodCirc_08145
caacagctcattttatgttgcttacagcacttagaaattg

SEQ ID NO: 683 - DNA, 40 bp, Artificial Sequence
  sequence surrounding the exon-exon junction in a head-to-tail arrangement of bloodCirc_16950
gcagtggcacagagtagcagcgaatgctgatgtcttaaag

SEQ ID NO: 684 - DNA, 40 bp, Artificial Sequence
  sequence surrounding the exon-exon junction in a head-to-tail arrangement of bloodCirc_16304
tgctttgcatcctaaatcaggaatcatctgctgcagtttg

SEQ ID NO: 685 - DNA, 40 bp, Artificial Sequence
  sequence surrounding the exon-exon junction in a head-to-tail arrangement of bloodCirc_16003
gatctcgtaagaaggattcaataatagatgccactcaaaa

SEQ ID NO: 686 - DNA, 40 bp, Artificial Sequence
  sequence surrounding the exon-exon junction in a head-to-tail arrangement of bloodCirc_23019
caaaccctggctcctccaaggctggaagtgatggagagag

SEQ ID NO: 687 - DNA, 40 bp, Artificial Sequence
  sequence surrounding the exon-exon junction in a head-to-tail arrangement of bloodCirc_20241
ttgtagacacagccgggcaagttcctcaagccaggaccta

SEQ ID NO: 688 - DNA, 40 bp, Artificial Sequence
  sequence surrounding the exon-exon junction in a head-to-tail arrangement of bloodCirc_12807
ggaccgcttacaacttctagcaggacagaaggagcaagct

SEQ ID NO: 689 - DNA, 40 bp, Artificial Sequence
  sequence surrounding the exon-exon junction in a head-to-tail arrangement of bloodCirc_23171
gtttgcctggtctatagttgtttgcaggcctttcagatat

SEQ ID NO: 690 - DNA, 40 bp, Artificial Sequence
  sequence surrounding the exon-exon junction in a head-to-tail arrangement of bloodCirc_12531
agccagcctctgggaccgaggacttccttcgctgggcatc

SEQ ID NO: 691 - DNA, 40 bp, Artificial Sequence
  sequence surrounding the exon-exon junction in a head-to-tail arrangement of bloodCirc_18517
ctgctgatagaacagttattatttgcatctgctggtgatg

SEQ ID NO: 692 - DNA, 40 bp, Artificial Sequence
  sequence surrounding the exon-exon junction in a head-to-tail arrangement of bloodCirc_15527
tactatagcagatcatacaggctaaagaacgtgccaatgg

SEQ ID NO: 693 - DNA, 40 bp, Artificial Sequence
  sequence surrounding the exon-exon junction in a head-to-tail arrangement of bloodCirc_15305
tgtcatgggattaattcttgcttcaaaagcagtggactgt

SEQ ID NO: 694 - DNA, 40 bp, Artificial Sequence
  sequence surrounding the exon-exon junction in a head-to-tail arrangement of bloodCirc_22668
tagcaacccttttggtttagtttaaggaagaaatctctaa

SEQ ID NO: 695 - DNA, 40 bp, Artificial Sequence
  sequence surrounding the exon-exon junction in a head-to-tail arrangement of bloodCirc_21527
aatagtgatagctttgataagattaatttatttttggaaa

SEQ ID NO: 696 - DNA, 40 bp, Artificial Sequence
  sequence surrounding the exon-exon junction in a head-to-tail arrangement of bloodCirc_04781
ggtagcaagtacatggggaggcccctagcagtcttcttga

SEQ ID NO: 697 - DNA, 40 bp, Artificial Sequence
  sequence surrounding the exon-exon junction in a head-to-tail arrangement of bloodCirc_15556
tcaactggcggaagacctcagttgcttgggagaccctaca

SEQ ID NO: 698 - DNA, 40 bp, Artificial Sequence
  sequence surrounding the exon-exon junction in a head-to-tail arrangement of bloodCirc_16517
attagaatcaataatctaaagcaagccaaattagagctga

SEQ ID NO: 699 - DNA, 40 bp, Artificial Sequence
  sequence surrounding the exon-exon junction in a head-to-tail arrangement of bloodCirc_08315
agatggatccacctgatgagctataatggatttccagttc

SEQ ID NO: 700 - DNA, 40 bp, Artificial Sequence
  sequence surrounding the exon-exon junction in a head-to-tail arrangement of bloodCirc_19101
aaagtcctcaaggccagcagttgtattccctgaatgacta

SEQ ID NO: 701 - DNA, 40 bp, Artificial Sequence
  sequence surrounding the exon-exon junction in a head-to-tail arrangement of bloodCirc_21658
tctttacatatgcttcacaggcaagatcacgtctctggat

SEQ ID NO: 702 - DNA, 40 bp, Artificial Sequence
  sequence surrounding the exon-exon junction in a head-to-tail arrangement of bloodCirc_09532
gaatacaagagtaaaagagggtgctgaggagtcatggaag

SEQ ID NO: 703 - DNA, 40 bp, Artificial Sequence
  sequence surrounding the exon-exon junction in a head-to-tail arrangement of bloodCirc_16574
gaccgagaatgtggaaacagttccaaagaactactggttc

SEQ ID NO: 704 - DNA, 40 bp, Artificial Sequence
  sequence surrounding the exon-exon junction in a head-to-tail arrangement of bloodCirc_18512
aaccctgctacaattggaaggatttgaactcagaggatca

SEQ ID NO: 705 - DNA, 40 bp, Artificial Sequence
  sequence surrounding the exon-exon junction in a head-to-tail arrangement of bloodCirc_14107
ctgaaacagttttgcagtcgaggagtttaataaagaaact

SEQ ID NO: 706 - DNA, 40 bp, Artificial Sequence
  sequence surrounding the exon-exon junction in a head-to-tail arrangement of bloodCirc_21420
accaccaagaaggcccggaggatattataccatttattga

SEQ ID NO: 707 - DNA, 40 bp, Artificial Sequence
  sequence surrounding the exon-exon junction in a head-to-tail arrangement of bloodCirc_22434
tttcaaacttgtggttctgcgccacttggtcattctggca

SEQ ID NO: 708 - DNA, 40 bp, Artificial Sequence
  sequence surrounding the exon-exon junction in a head-to-tail arrangement of bloodCirc_03355
gtaacagtgagatagagcagaaagagaaaaaagagaagcc

SEQ ID NO: 709 - DNA, 40 bp, Artificial Sequence
  sequence surrounding the exon-exon junction in a head-to-tail arrangement of bloodCirc_10521
taaccatgatctatattcagctgaagcatttgatttgatt

SEQ ID NO: 710 - DNA, 40 bp, Artificial Sequence
  sequence surrounding the exon-exon junction in a head-to-tail arrangement of bloodCirc_16492
taggagaaatgatacacgaaaattcggttccctcaaaatt

SEQ ID NO: 711 - DNA, 40 bp, Artificial Sequence
  sequence surrounding the exon-exon junction in a head-to-tail arrangement of bloodCirc_20383
aaagaaacctaatatttcaggtaataatagacgtggatgg

SEQ ID NO: 712 - DNA, 40 bp, Artificial Sequence
  sequence surrounding the exon-exon junction in a head-to-tail arrangement of bloodCirc_07724
gtcccgaaagtgctaaaaaggagaaattgtcgtaaatgaa

SEQ ID NO: 713 - DNA, 40 bp, Artificial Sequence
  sequence surrounding the exon-exon junction in a head-to-tail arrangement of bloodCirc_21531
aatggtgggcttaattttaggattaatttatttttggaaa

SEQ ID NO: 714 - DNA, 40 bp, Artificial Sequence
  sequence surrounding the exon-exon junction in a head-to-tail arrangement of bloodCirc_07279
gtcagacaaagagaaaaaaggggcaatgaaaactattcta

SEQ ID NO: 715 - DNA, 40 bp, Artificial Sequence
  sequence surrounding the exon-exon junction in a head-to-tail arrangement of bloodCirc_19458
aggcctgattttcgtcctaagtattttgattccgttcaag

SEQ ID NO: 716 - DNA, 40 bp, Artificial Sequence
  sequence surrounding the exon-exon junction in a head-to-tail arrangement of bloodCirc_22716
tcatctggctcagagtcaagattatctgcaattatgaaat

SEQ ID NO: 717 - DNA, 40 bp, Artificial Sequence
  sequence surrounding the exon-exon junction in a head-to-tail arrangement of bloodCirc_13376
gttgccccattgcaaagtggaacaaatagtggagaaagat

SEQ ID NO: 718 - DNA, 40 bp, Artificial Sequence
  sequence surrounding the exon-exon junction in a head-to-tail arrangement of bloodCirc_09780
gaaacagaaaagagaaccaggctgttgaagccaaggaaaa

SEQ ID NO: 719 - DNA, 40 bp, Artificial Sequence
  sequence surrounding the exon-exon junction in a head-to-tail arrangement of bloodCirc_20641
acaagagtacaaaacagcagggaaaaagacctcgatgaag

SEQ ID NO: 720 - DNA, 40 bp, Artificial Sequence
  sequence surrounding the exon-exon junction in a head-to-tail arrangement of bloodCirc_13248
agagaccccctgaagattcgatcttagcaaagcaatgtct

SEQ ID NO: 721 - DNA, 40 bp, Artificial Sequence
  sequence surrounding the exon-exon junction in a head-to-tail arrangement of bloodCirc_02469
gaaagtctctacagaccttggctattcaggcagctatcag

SEQ ID NO: 722 - DNA, 40 bp, Artificial Sequence
  sequence surrounding the exon-exon junction in a head-to-tail arrangement of bloodCirc_03025
agccaccttgttctctaaagttttcagtttaaattctcaa

SEQ ID NO: 723 - DNA, 40 bp, Artificial Sequence
  sequence surrounding the exon-exon junction in a head-to-tail arrangement of bloodCirc_03075
agcagcagaaaaatctcaagaaagtagcacgtctggaaat

SEQ ID NO: 724 - DNA, 40 bp, Artificial Sequence
  sequence surrounding the exon-exon junction in a head-to-tail arrangement of bloodCirc_19518
cttagctgttaacgggaaaggttgaaaggattgttgacaa

SEQ ID NO: 725 - DNA, 40 bp, Artificial Sequence
  sequence surrounding the exon-exon junction in a head-to-tail arrangement of bloodCirc_03513
agagtaatgaaatggaggagatctaaatgttaaagagaaa

SEQ ID NO: 726 - DNA, 40 bp, Artificial Sequence
  sequence surrounding the exon-exon junction in a head-to-tail arrangement of bloodCirc_17257
acagcagcagcagcaaactagtgggtttggaggatttggg

SEQ ID NO: 727 - DNA, 40 bp, Artificial Sequence
  sequence surrounding the exon-exon junction in a head-to-tail arrangement of bloodCirc_03656
tgagaagagataaagtaaagggtttgaaagtattcttgaa

SEQ ID NO: 728 - DNA, 40 bp, Artificial Sequence
  sequence surrounding the exon-exon junction in a head-to-tail arrangement of bloodCirc_15717
cagggcagaaaccaacaaagagtgatgacagacctaatgc

SEQ ID NO: 729 - DNA, 40 bp, Artificial Sequence
  sequence surrounding the exon-exon junction in a head-to-tail arrangement of bloodCirc_05517
ttgggctgcctttcctgcaggtgctatacgtggatgacct

SEQ ID NO: 730 - DNA, 40 bp, Artificial Sequence
  sequence surrounding the exon-exon junction in a head-to-tail arrangement of bloodCirc_20627
aaaagccacaagttgaccaagtatttcagttactaactga

SEQ ID NO: 731 - DNA, 40 bp, Artificial Sequence
  sequence surrounding the exon-exon junction in a head-to-tail arrangement of bloodCirc_15459
aataagcccaccctttatcggaatcatgggtaaagaagga

SEQ ID NO: 732 - DNA, 40 bp, Artificial Sequence
  sequence surrounding the exon-exon junction in a head-to-tail arrangement of bloodCirc_07824
caaccccatctccagacaaagtaacagagattcaaaggta

SEQ ID NO: 733 - DNA, 40 bp, Artificial Sequence
  sequence surrounding the exon-exon junction in a head-to-tail arrangement of bloodCirc_19559
agtaaacagactcaaagaaggaaggaccatcgagacctgt

SEQ ID NO: 734 - DNA, 40 bp, Artificial Sequence
  sequence surrounding the exon-exon junction in a head-to-tail arrangement of bloodCirc_17227
acctgctccaagtccctcaggggtggcactgaatcaacaa

SEQ ID NO: 735 - DNA, 40 bp, Artificial Sequence
  sequence surrounding the exon-exon junction in a head-to-tail arrangement of bloodCirc_08494
ggtttatctaaaaaccaaagtgtgaagttttaacttggag

SEQ ID NO: 736 - DNA, 40 bp, Artificial Sequence
  sequence surrounding the exon-exon junction in a head-to-tail arrangement of bloodCirc_20064
gattgaaaaggctgtaaatggaacattttagtggacaaac

SEQ ID NO: 737 - DNA, 40 bp, Artificial Sequence
  sequence surrounding the exon-exon junction in a head-to-tail arrangement of bloodCirc_06896
ctgttttagaacatataaaggatttccatttaaacagggt

SEQ ID NO: 738 - DNA, 40 bp, Artificial Sequence
  sequence surrounding the exon-exon junction in a head-to-tail arrangement of bloodCirc_13805
accctagttcacgaatcaaggtgggaagaagagcgctatc

SEQ ID NO: 739 - DNA, 40 bp, Artificial Sequence
  sequence surrounding the exon-exon junction in a head-to-tail arrangement of bloodCirc_15234
tcaaaaagcagaacaagaagaaatgggacgtcggtcatca

SEQ ID NO: 740 - DNA, 40 bp, Artificial Sequence
  sequence surrounding the exon-exon junction in a head-to-tail arrangement of bloodCirc_18114
accatcaaagtcaaataaaggaatatatgtattctgatag

SEQ ID NO: 741 - DNA, 40 bp, Artificial Sequence
  sequence surrounding the exon-exon junction in a head-to-tail arrangement of bloodCirc_22270
caggagctaatgattcaaaagtacctcatcgcccatcctt

SEQ ID NO: 742 - DNA, 40 bp, Artificial Sequence
  sequence surrounding the exon-exon junction in a head-to-tail arrangement of bloodCirc_09250
catatgaaagtggattatgggagtgacagtgaggattcac

SEQ ID NO: 743 - DNA, 40 bp, Artificial Sequence
  sequence surrounding the exon-exon junction in a head-to-tail arrangement of bloodCirc_18068
gcagactttaggcctgaaaggaaaagtaagaagcttaagc

SEQ ID NO: 744 - DNA, 40 bp, Artificial Sequence
  sequence surrounding the exon-exon junction in a head-to-tail arrangement of bloodCirc_21532
ccggatatttaagtacaatggattaatttatttttggaaa

SEQ ID NO: 745 - DNA, 40 bp, Artificial Sequence
  sequence surrounding the exon-exon junction in a head-to-tail arrangement of bloodCirc_10651
aattaagttttctgttaaagcttcaagtggaaataaagag

SEQ ID NO: 746 - DNA, 40 bp, Artificial Sequence
  sequence surrounding the exon-exon junction in a head-to-tail arrangement of bloodCirc_13115
gttacaaaaatccagaccagctttccccacaaataaacca

SEQ ID NO: 747 - DNA, 40 bp, Artificial Sequence
  sequence surrounding the exon-exon junction in a head-to-tail arrangement of bloodCirc_18933
aatggctcggccaagttcaataaatggaaatgttttctaa

SEQ ID NO: 748 - DNA, 40 bp, Artificial Sequence
  sequence surrounding the exon-exon junction in a head-to-tail arrangement of bloodCirc_22782
acaccaaaaggaatccgcagatggcgttcaggaagtggct

SEQ ID NO: 749 - DNA, 40 bp, Artificial Sequence
  sequence surrounding the exon-exon junction in a head-to-tail arrangement of bloodCirc_22389
ctcagtcctcagtcatcttgctttctgaaacaaaggtctt

SEQ ID NO: 750 - DNA, 40 bp, Artificial Sequence
  sequence surrounding the exon-exon junction in a head-to-tail arrangement of bloodCirc_16786
aaaaagtgtgggaagagcatgtttatctggcaagactgag

SEQ ID NO: 751 - DNA, 40 bp, Artificial Sequence
  sequence surrounding the exon-exon junction in a head-to-tail arrangement of bloodCirc_17237
catatccaaattttaatacagcaagaattagagggttgaa

SEQ ID NO: 752 - DNA, 40 bp, Artificial Sequence
  sequence surrounding the exon-exon junction in a head-to-tail arrangement of bloodCirc_12672
tgacagtcctcagtatgcaggattctagatatttctttta

SEQ ID NO: 753 - DNA, 40 bp, Artificial Sequence
  sequence surrounding the exon-exon junction in a head-to-tail arrangement of bloodCirc_06705
ctttgatagaaatccaataggcatcagagaccccaactct

SEQ ID NO: 754 - DNA, 40 bp, Artificial Sequence
  sequence surrounding the exon-exon junction in a head-to-tail arrangement of bloodCirc_18425
catagtagtccaaaaataaggtattttgatcacaactata

SEQ ID NO: 755 - DNA, 40 bp, Artificial Sequence
  sequence surrounding the exon-exon junction in a head-to-tail arrangement of bloodCirc_17203
cgagttaaatatcacccacggaatatgaagacaaggctgg

SEQ ID NO: 756 - DNA, 40 bp, Artificial Sequence
  sequence surrounding the exon-exon junction in a head-to-tail arrangement of bloodCirc_21660
tcgtcagatcaaagaacaagttgctgatatgtgttcaaga

SEQ ID NO: 757 - DNA, 40 bp, Artificial Sequence
  sequence surrounding the exon-exon junction in a head-to-tail arrangement of bloodCirc_00651
cagataatttaaaaaatgagaatacagagtcaaaaaagtt

SEQ ID NO: 758 - DNA, 40 bp, Artificial Sequence
  sequence surrounding the exon-exon junction in a head-to-tail arrangement of bloodCirc_17135
acctctgattccaccaccgggagattacctggggcaattg

SEQ ID NO: 759 - DNA, 40 bp, Artificial Sequence
  sequence surrounding the exon-exon junction in a head-to-tail arrangement of bloodCirc_06702
ctttgatagaaatccaataggtgtatttgtcaaattttgc

SEQ ID NO: 760 - DNA, 40 bp, Artificial Sequence
  sequence surrounding the exon-exon junction in a head-to-tail arrangement of bloodCirc_20191
cccgagaccagcccccagggtacaagaagaattcctatgg

SEQ ID NO: 761 - DNA, 40 bp, Artificial Sequence
  sequence surrounding the exon-exon junction in a head-to-tail arrangement of bloodCirc_09521
tcaggggtcctcataaacaggtttgaaatatctccattca

SEQ ID NO: 762 - DNA, 40 bp, Artificial Sequence
  sequence surrounding the exon-exon junction in a head-to-tail arrangement of bloodCirc_01122
atagaggagtcatcaaacagtgagaaagatcagtctaaag

SEQ ID NO: 763 - DNA, 40 bp, Artificial Sequence
  sequence surrounding the exon-exon junction in a head-to-tail arrangement of bloodCirc_12330
tcctgacacaacaccactcacttcgcagaatcaagaacgg

SEQ ID NO: 764 - DNA, 40 bp, Artificial Sequence
  sequence surrounding the exon-exon junction in a head-to-tail arrangement of bloodCirc_05912
acgcctagctcttgtcacagttccgatgaagttaaattcc

SEQ ID NO: 765 - DNA, 40 bp, Artificial Sequence
  sequence surrounding the exon-exon junction in a head-to-tail arrangement of bloodCirc_02086
aacaagaaattaaaatcaaggtgtaaaaatgaagaaaaaa

SEQ ID NO: 766 - DNA, 40 bp, Artificial Sequence
  sequence surrounding the exon-exon junction in a head-to-tail arrangement of bloodCirc_10343
atctgcaaattgaagtgcaggtacaggtgaacaaaggcag

SEQ ID NO: 767 - DNA, 40 bp, Artificial Sequence
  sequence surrounding the exon-exon junction in a head-to-tail arrangement of bloodCirc_20291
aaatggctccctgattcatgatatgtttccttctttttgc

SEQ ID NO: 768 - DNA, 40 bp, Artificial Sequence
  sequence surrounding the exon-exon junction in a head-to-tail arrangement of bloodCirc_14199
tttatcgaccaaaatttttaatgattaatttagcagaatc

SEQ ID NO: 769 - DNA, 40 bp, Artificial Sequence
  sequence surrounding the exon-exon junction in a head-to-tail arrangement of bloodCirc_21045
agcctgttgaccctgatgaggtgcaagaattgtttatccg

SEQ ID NO: 770 - DNA, 40 bp, Artificial Sequence
  sequence surrounding the exon-exon junction in a head-to-tail arrangement of bloodCirc_14325
agaaagaaaaacagctggagaccctgaaggaagattggga

SEQ ID NO: 771 - DNA, 40 bp, Artificial Sequence
  sequence surrounding the exon-exon junction in a head-to-tail arrangement of bloodCirc_19798
ataagtaatcttcaccaaaggtggtgactctcaaaaggaa

SEQ ID NO: 772 - DNA, 40 bp, Artificial Sequence
  sequence surrounding the exon-exon junction in a head-to-tail arrangement of bloodCirc_02845
tagagagtgctcaggaatgaggtttgtgtttagtgaatca

SEQ ID NO: 773 - DNA, 40 bp, Artificial Sequence
  sequence surrounding the exon-exon junction in a head-to-tail arrangement of bloodCirc_03993
acaaccacaaacagattgaggtgataactaccccgtacag

SEQ ID NO: 774 - DNA, 40 bp, Artificial Sequence
  sequence surrounding the exon-exon junction in a head-to-tail arrangement of bloodCirc_16545
caactccgaaaaaaacttaggttgcacagtgaattaaaag

SEQ ID NO: 775 - DNA, 40 bp, Artificial Sequence
  sequence surrounding the exon-exon junction in a head-to-tail arrangement of bloodCirc_06880
tggtgactcacagaaccttgctaaaaaacattcccttcaa

SEQ ID NO: 776 - DNA, 40 bp, Artificial Sequence
  sequence surrounding the exon-exon junction in a head-to-tail arrangement of bloodCirc_18314
gaagtgttaaaaagaaaaagttccaaaagctgagacaaga

SEQ ID NO: 777 - DNA, 40 bp, Artificial Sequence
  sequence surrounding the exon-exon junction in a head-to-tail arrangement of bloodCirc_20221
cattgcgcgggactagggagaataatcatgggccagactg

SEQ ID NO: 778 - DNA, 40 bp, Artificial Sequence
  sequence surrounding the exon-exon junction in a head-to-tail arrangement of bloodCirc_07570
actgttcttgaggtattcaggtatattactcgaggggttt

SEQ ID NO: 779 - DNA, 40 bp, Artificial Sequence
  sequence surrounding the exon-exon junction in a head-to-tail arrangement of bloodCirc_02091
taccgagactagtaataaaggtgtaaaaatgaagaaaaaa

SEQ ID NO: 780 - DNA, 40 bp, Artificial Sequence
  sequence surrounding the exon-exon junction in a head-to-tail arrangement of bloodCirc_17014
tggcaatgttttcttggacgaatttagcttgggttaaatc

SEQ ID NO: 781 - DNA, 40 bp, Artificial Sequence
  sequence surrounding the exon-exon junction in a head-to-tail arrangement of bloodCirc_13755
caaaactctttgacaggaagtttaatacaattttttagta

SEQ ID NO: 782 - DNA, 40 bp, Artificial Sequence
  sequence surrounding the exon-exon junction in a head-to-tail arrangement of bloodCirc_07121
gagccctctagtactactagagagcacgttttcaatatca

SEQ ID NO: 783 - DNA, 40 bp, Artificial Sequence
  sequence surrounding the exon-exon junction in a head-to-tail arrangement of bloodCirc_20223
ctgtgcacatcctgacttctaataatcatgggccagactg

SEQ ID NO: 784 - DNA, 40 bp, Artificial Sequence
  sequence surrounding the exon-exon junction in a head-to-tail arrangement of bloodCirc_00933
ctttttataaaacatttaaggacttgcaattgtgaccaaa

SEQ ID NO: 785 - DNA, 40 bp, Artificial Sequence
  sequence surrounding the exon-exon junction in a head-to-tail arrangement of bloodCirc_07159
aaagcaagaaaagtatattggcggtggatgaattttattc

SEQ ID NO: 786 - DNA, 40 bp, Artificial Sequence
  sequence surrounding the exon-exon junction in a head-to-tail arrangement of bloodCirc_10346
aaaggcttcaaagctagcaggtacaggtgaacaaaggcag

SEQ ID NO: 787 - DNA, 40 bp, Artificial Sequence
  sequence surrounding the exon-exon junction in a head-to-tail arrangement of bloodCirc_21643
tgcaaaaggaaatctgataagaatacggttggacagaatg

SEQ ID NO: 788 - DNA, 40 bp, Artificial Sequence
  sequence surrounding the exon-exon junction in a head-to-tail arrangement of bloodCirc_13454
tatgggatgagaaagttcaagtcaactttgtagtgtgcca

SEQ ID NO: 789 - DNA, 40 bp, Artificial Sequence
  sequence surrounding the exon-exon junction in a head-to-tail arrangement of bloodCirc_18540
ccattatttcgaggaaggaagttttatttttcttctggtg

SEQ ID NO: 790 - DNA, 40 bp, Artificial Sequence
  sequence surrounding the exon-exon junction in a head-to-tail arrangement of bloodCirc_18111
aaaagaagttcaagataaagtgtttgggaaatgggaagta

SEQ ID NO: 791 - DNA, 40 bp, Artificial Sequence
  sequence surrounding the exon-exon junction in a head-to-tail arrangement of bloodCirc_10507
agttatgggagagaaaaaagctttaccgatttgttacaac

SEQ ID NO: 792 - DNA, 40 bp, Artificial Sequence
  sequence surrounding the exon-exon junction in a head-to-tail arrangement of bloodCirc_18863
atactattgttccaggccagatgacaatcaaaacaaaaca

SEQ ID NO: 793 - DNA, 40 bp, Artificial Sequence
  sequence surrounding the exon-exon junction in a head-to-tail arrangement of bloodCirc_00144
aaagtttcacaaggagtaaggagaattctcaccaaatgtt

SEQ ID NO: 794 - DNA, 40 bp, Artificial Sequence
  sequence surrounding the exon-exon junction in a head-to-tail arrangement of bloodCirc_03188
tctgggtgatccagccaaagaaaataaaattaatgaagca

SEQ ID NO: 795 - DNA, 40 bp, Artificial Sequence
  sequence surrounding the exon-exon junction in a head-to-tail arrangement of bloodCirc_18463
aatgcacagcttgtgttcaggtgtgtcacggggtcccagc

SEQ ID NO: 796 - DNA, 40 bp, Artificial Sequence
  sequence surrounding the exon-exon junction in a head-to-tail arrangement of bloodCirc_12665
ttgaactccatcaaaaagggtaaggcgaaagagaatgaaa

SEQ ID NO: 797 - DNA, 40 bp, Artificial Sequence
  sequence surrounding the exon-exon junction in a head-to-tail arrangement of bloodCirc_22491
tgaaaactctgttactgaagcttcaaggttactgactttt

SEQ ID NO: 798 - DNA, 40 bp, Artificial Sequence
  sequence surrounding the exon-exon junction in a head-to-tail arrangement of bloodCirc_08822
tggggattaggctcttttaggagaagtacagcatcgggga

SEQ ID NO: 799 - DNA, 40 bp, Artificial Sequence
  sequence surrounding the exon-exon junction in a head-to-tail arrangement of bloodCirc_09342
catcaaatgagacacagacggacatcacctgttccaaccc

SEQ ID NO: 800 - DNA, 40 bp, Artificial Sequence
  sequence surrounding the exon-exon junction in a head-to-tail arrangement of bloodCirc_21674
cggggcatgtacaatcagagatgttctcagtgcagctgag

SEQ ID NO: 801 - DNA, 40 bp, Artificial Sequence
  sequence surrounding the exon-exon junction in a head-to-tail arrangement of bloodCirc_03883
cactggtttgcagagtccagcgcctagaagattatcagcg

SEQ ID NO: 802 - DNA, 40 bp, Artificial Sequence
  sequence surrounding the exon-exon junction in a head-to-tail arrangement of bloodCirc_19740
caatcaacctaggaaaaaagctctgagaaagtggccgaaa

SEQ ID NO: 803 - DNA, 40 bp, Artificial Sequence
  sequence surrounding the exon-exon junction in a head-to-tail arrangement of bloodCirc_20697
tatgggagtataatgttgtgttgatcacagccgagttaaa

SEQ ID NO: 804 - DNA, 40 bp, Artificial Sequence
  sequence surrounding the exon-exon junction in a head-to-tail arrangement of bloodCirc_05413
tcaaactcctgtgaatacaggccaagatagccaggttaac

SEQ ID NO: 805 - DNA, 40 bp, Artificial Sequence
  sequence surrounding the exon-exon junction in a head-to-tail arrangement of bloodCirc_02968
agatcttcagtactggccagccttcacttaacttaaggga

SEQ ID NO: 806 - DNA, 40 bp, Artificial Sequence
  sequence surrounding the exon-exon junction in a head-to-tail arrangement of bloodCirc_00185
actcaaagtggatgaggaaaggtggatgtgaacactgacc

SEQ ID NO: 807 - DNA, 40 bp, Artificial Sequence
  sequence surrounding the exon-exon junction in a head-to-tail arrangement of bloodCirc_22996
ccatcctccaaacaagtgaaacaaacaaaggtgatgcact

SEQ ID NO: 808 - DNA, 40 bp, Artificial Sequence
  sequence surrounding the exon-exon junction in a head-to-tail arrangement of bloodCirc_02080
aacaagaaattaaaatcaaggaggaagagtagaattatgt

SEQ ID NO: 809 - DNA, 40 bp, Artificial Sequence
  sequence surrounding the exon-exon junction in a head-to-tail arrangement of bloodCirc_04138
actataacaagtatgaagagagaaaaaatggctcaagcat

SEQ ID NO: 810 - DNA, 40 bp, Artificial Sequence
  sequence surrounding the exon-exon junction in a head-to-tail arrangement of bloodCirc_13631
taagctcatcattgttactgagctgcagagatcctttggt

SEQ ID NO: 811 - DNA, 40 bp, Artificial Sequence
  sequence surrounding the exon-exon junction in a head-to-tail arrangement of bloodCirc_21883
tctgtggaagaagctatcagatcttggagtctctgtggat

SEQ ID NO: 812 - DNA, 40 bp, Artificial Sequence
  sequence surrounding the exon-exon junction in a head-to-tail arrangement of bloodCirc_10514
ttgttccagatcttaacagttgagatggaagattttcgag

SEQ ID NO: 813 - DNA, 40 bp, Artificial Sequence
  sequence surrounding the exon-exon junction in a head-to-tail arrangement of bloodCirc_15292
caacccgagaggtgcaggagagactgtatacaatttgaga

SEQ ID NO: 814 - DNA, 40 bp, Artificial Sequence
  sequence surrounding the exon-exon junction in a head-to-tail arrangement of bloodCirc_09077
actgctcttttaaaaacaaggagtgtttctcaggagctat

SEQ ID NO: 815 - DNA, 40 bp, Artificial Sequence
  sequence surrounding the exon-exon junction in a head-to-tail arrangement of bloodCirc_20343
tgcactacaattttttatggatccgtgattctaactgcaa

SEQ ID NO: 816 - DNA, 40 bp, Artificial Sequence
  sequence surrounding the exon-exon junction in a head-to-tail arrangement of bloodCirc_06102
cagaaatggaagcagattaggatttttcaagccacattca

SEQ ID NO: 817 - DNA, 40 bp, Artificial Sequence
  sequence surrounding the exon-exon junction in a head-to-tail arrangement of bloodCirc_21911
cttaatgcagcacttattaaccgattacacctcaacaaga

SEQ ID NO: 818 - DNA, 40 bp, Artificial Sequence
  sequence surrounding the exon-exon junction in a head-to-tail arrangement of bloodCirc_16667
ttatgctactgtgttctcaggcagtagatcatctaatgca

SEQ ID NO: 819 - DNA, 40 bp, Artificial Sequence
  sequence surrounding the exon-exon junction in a head-to-tail arrangement of bloodCirc_08476
tgtgagaactatttatgcaggtggcacaagatctctgtaa

SEQ ID NO: 820 - DNA, 40 bp, Artificial Sequence
  sequence surrounding the exon-exon junction in a head-to-tail arrangement of bloodCirc_02444
agcccgtttgtgaatcagcggttgaagaaatatggagatc

SEQ ID NO: 821 - DNA, 40 bp, Artificial Sequence
  sequence surrounding the exon-exon junction in a head-to-tail arrangement of bloodCirc_17034
agaaatagaatacagagaaatgatctagaacaacttcgaa

SEQ ID NO: 822 - DNA, 40 bp, Artificial Sequence
  sequence surrounding the exon-exon junction in a head-to-tail arrangement of bloodCirc_00281
tcagtacagtagaagctctggtgacagagttagtccttga

SEQ ID NO: 823 - DNA, 40 bp, Artificial Sequence
  sequence surrounding the exon-exon junction in a head-to-tail arrangement of bloodCirc_03999
acaaccacaaacagattgaggtacacctgagagcctggca

SEQ ID NO: 824 - DNA, 40 bp, Artificial Sequence
  sequence surrounding the exon-exon junction in a head-to-tail arrangement of bloodCirc_22667
atccagatataatgagacaatttaaggaagaaatctctaa

SEQ ID NO: 825 - DNA, 40 bp, Artificial Sequence
  sequence surrounding the exon-exon junction in a head-to-tail arrangement of bloodCirc_22261
gcactgatgcaaaaataaagagaaaaacagaaatctgaag

SEQ ID NO: 826 - DNA, 40 bp, Artificial Sequence
  sequence surrounding the exon-exon junction in a head-to-tail arrangement of bloodCirc_10952
taggacttcagaaaaagcagggatttgtcttggctgttac

SEQ ID NO: 827 - DNA, 40 bp, Artificial Sequence
  sequence surrounding the exon-exon junction in a head-to-tail arrangement of bloodCirc_19236
aaggaagaaatgttgaaaaaaaaagagtctcatcgtggaa

SEQ ID NO: 828 - DNA, 40 bp, Artificial Sequence
  sequence surrounding the exon-exon junction in a head-to-tail arrangement of bloodCirc_13408
aagggctgtggctgatgatggggacaggcaaatggtatga

SEQ ID NO: 829 - DNA, 40 bp, Artificial Sequence
  sequence surrounding the exon-exon junction in a head-to-tail arrangement of bloodCirc_07053
agtgtcttcaatgcctgcttgaaaacggacgatgtattac

SEQ ID NO: 830 - DNA, 40 bp, Artificial Sequence
  sequence surrounding the exon-exon junction in a head-to-tail arrangement of bloodCirc_04125
tgctgagtgaattagtccagtttacctaaagcagtaaaaa

SEQ ID NO: 831 - DNA, 40 bp, Artificial Sequence
  sequence surrounding the exon-exon junction in a head-to-tail arrangement of bloodCirc_09176
ccgagccctacctcctcacggctgtcattatttgtatcaa

SEQ ID NO: 832 - DNA, 40 bp, Artificial Sequence
  sequence surrounding the exon-exon junction in a head-to-tail arrangement of bloodCirc_20988
ttgctcagccttgccagcagtccaatatcagatggaaatg

SEQ ID NO: 833 - DNA, 40 bp, Artificial Sequence
  sequence surrounding the exon-exon junction in a head-to-tail arrangement of bloodCirc_18339
actggatgtcagcaagaatgaatgttggctcaattaagaa

SEQ ID NO: 834 - DNA, 40 bp, Artificial Sequence
  sequence surrounding the exon-exon junction in a head-to-tail arrangement of bloodCirc_16176
aactagacagagaaaaacttcacttttccagccattaact

SEQ ID NO: 835 - DNA, 40 bp, Artificial Sequence
  sequence surrounding the exon-exon junction in a head-to-tail arrangement of bloodCirc_11220
agttgagcaccggaaagaacgaagaaggtagataatgact

SEQ ID NO: 836 - DNA, 40 bp, Artificial Sequence
  sequence surrounding the exon-exon junction in a head-to-tail arrangement of bloodCirc_14276
acagaggaattggcagtcttgatcaagaattggttaaaat

SEQ ID NO: 837 - DNA, 40 bp, Artificial Sequence
  sequence surrounding the exon-exon junction in a head-to-tail arrangement of bloodCirc_11806
gaggatcaggaaaaactatggatttgaatttgttgaaatg

SEQ ID NO: 838 - DNA, 40 bp, Artificial Sequence
  sequence surrounding the exon-exon junction in a head-to-tail arrangement of bloodCirc_07606
agaatcaagaagctacaaaggataacagtcttgctgaaga

SEQ ID NO: 839 - DNA, 40 bp, Artificial Sequence
  sequence surrounding the exon-exon junction in a head-to-tail arrangement of bloodCirc_17751
agcactaactatttcaaaaggaattgaatgatctggcacg

SEQ ID NO: 840 - DNA, 40 bp, Artificial Sequence
  sequence surrounding the exon-exon junction in a head-to-tail arrangement of bloodCirc_07232
caatgaaagcacctctgttgataacatagatcatcagtag

SEQ ID NO: 841 - DNA, 40 bp, Artificial Sequence
  sequence surrounding the exon-exon junction in a head-to-tail arrangement of bloodCirc_00197
acactcccctaacatatttgggaagaggaagaacgtctga

SEQ ID NO: 842 - DNA, 40 bp, Artificial Sequence
  sequence surrounding the exon-exon junction in a head-to-tail arrangement of bloodCirc_18265
acgtctagttcagaaaacagtttcagagtggcagaatcac

SEQ ID NO: 843 - DNA, 40 bp, Artificial Sequence
  sequence surrounding the exon-exon junction in a head-to-tail arrangement of bloodCirc_04703
atatgatgtggaagcacatgaagaatcaaaagaacctgtt

SEQ ID NO: 844 - DNA, 40 bp, Artificial Sequence
  sequence surrounding the exon-exon junction in a head-to-tail arrangement of bloodCirc_22665
tgagtgctgcacaagagcagtttaaggaagaaatctctaa

SEQ ID NO: 845 - DNA, 40 bp, Artificial Sequence
  sequence surrounding the exon-exon junction in a head-to-tail arrangement of bloodCirc_19216
ttcaggccaaaagagaaaaggcaccagttagaagacaaat

SEQ ID NO: 846 - DNA, 40 bp, Artificial Sequence
  sequence surrounding the exon-exon junction in a head-to-tail arrangement of bloodCirc_17361
tgccttctcagtcagttgagtttgtacaatgacgacagaa

SEQ ID NO: 847 - DNA, 40 bp, Artificial Sequence
  sequence surrounding the exon-exon junction in a head-to-tail arrangement of bloodCirc_09584
gatttctcctctaatgacagcatcagcgagagctttctaa

SEQ ID NO: 848 - DNA, 40 bp, Artificial Sequence
  sequence surrounding the exon-exon junction in a head-to-tail arrangement of bloodCirc_06777
atatccttacaggcagagagaagggatcaagttctgttca

SEQ ID NO: 849 - DNA, 40 bp, Artificial Sequence
  sequence surrounding the exon-exon junction in a head-to-tail arrangement of bloodCirc_21042
tgtggcttgcagcactcctggttcctgattatgtcactgt

SEQ ID NO: 850 - DNA, 40 bp, Artificial Sequence
  sequence surrounding the exon-exon junction in a head-to-tail arrangement of bloodCirc_15108
acatttgtgctaaacagccgaaaatgcaattcttgacttg

SEQ ID NO: 851 - DNA, 40 bp, Artificial Sequence
  sequence surrounding the exon-exon junction in a head-to-tail arrangement of bloodCirc_06177
acagaaaacttcattcacagctgatgtagcccagcagttc

SEQ ID NO: 852 - DNA, 40 bp, Artificial Sequence
  sequence surrounding the exon-exon junction in a head-to-tail arrangement of bloodCirc_10983
tgatgatgaaagttacacagatccaggatgagaagactga

SEQ ID NO: 853 - DNA, 40 bp, Artificial Sequence
  sequence surrounding the exon-exon junction in a head-to-tail arrangement of bloodCirc_10604
aaggaatcgaattttaccaggatttttgtaattttatccc

SEQ ID NO: 854 - DNA, 40 bp, Artificial Sequence
  sequence surrounding the exon-exon junction in a head-to-tail arrangement of bloodCirc_08542
gttgtggggagagccaggggctctattatcaagtcctaaa

SEQ ID NO: 855 - DNA, 40 bp, Artificial Sequence
  sequence surrounding the exon-exon junction in a head-to-tail arrangement of bloodCirc_02224
taatggaacagaattttgagttacagctcttttgaggaag

SEQ ID NO: 856 - DNA, 40 bp, Artificial Sequence
  sequence surrounding the exon-exon junction in a head-to-tail arrangement of bloodCirc_01705
tcacttatgaggctgcccagaaaaagagagaaagactaga

SEQ ID NO: 857 - DNA, 40 bp, Artificial Sequence
  sequence surrounding the exon-exon junction in a head-to-tail arrangement of bloodCirc_07102
aatttccatgaaagaagcaggtagttcagctacaggaatg

SEQ ID NO: 858 - DNA, 40 bp, Artificial Sequence
  sequence surrounding the exon-exon junction in a head-to-tail arrangement of bloodCirc_04624
ctggatacaatgtaaagcaggtacgattgcaattatggga

SEQ ID NO: 859 - DNA, 40 bp, Artificial Sequence
  sequence surrounding the exon-exon junction in a head-to-tail arrangement of bloodCirc_06763
aggctctagtaactgtccaggctgctgacttgagtaaacc

SEQ ID NO: 860 - DNA, 40 bp, Artificial Sequence
  sequence surrounding the exon-exon junction in a head-to-tail arrangement of bloodCirc_00399
gatactacatattccagatggccaagcatggggatcagca

SEQ ID NO: 861 - DNA, 40 bp, Artificial Sequence
  sequence surrounding the exon-exon junction in a head-to-tail arrangement of bloodCirc_10224
gtttcttgccatcttacaaggccttttcagatattaatgg

SEQ ID NO: 862 - DNA, 40 bp, Artificial Sequence
  sequence surrounding the exon-exon junction in a head-to-tail arrangement of bloodCirc_16576
atggagtagaaaatcaagagttccaaagaactactggttc

SEQ ID NO: 863 - DNA, 40 bp, Artificial Sequence
  sequence surrounding the exon-exon junction in a head-to-tail arrangement of bloodCirc_16378
atctccacaactttttgcagactatggaaatggtgtcaga

SEQ ID NO: 864 - DNA, 40 bp, Artificial Sequence
  sequence surrounding the exon-exon junction in a head-to-tail arrangement of bloodCirc_08827
atttttggctccaataaatggctgcagagactgcaagtct

SEQ ID NO: 865 - DNA, 40 bp, Artificial Sequence
  sequence surrounding the exon-exon junction in a head-to-tail arrangement of bloodCirc_09125
ggggacatcctgttgtgaagatcttgagccagatgattgt

SEQ ID NO: 866 - DNA, 40 bp, Artificial Sequence
  sequence surrounding the exon-exon junction in a head-to-tail arrangement of bloodCirc_08521
tgaaacagaagatgtgcagggtgtgcaactgaggaacatg

SEQ ID NO: 867 - DNA, 40 bp, Artificial Sequence
  sequence surrounding the exon-exon junction in a head-to-tail arrangement of bloodCirc_22418
tggaagggaattcagacacaattttctattttgtacatac

SEQ ID NO: 868 - DNA, 40 bp, Artificial Sequence
  sequence surrounding the exon-exon junction in a head-to-tail arrangement of bloodCirc_17441
gtaagacctagtgccataaggaggacttaaatgcattgga

SEQ ID NO: 869 - DNA, 40 bp, Artificial Sequence
  sequence surrounding the exon-exon junction in a head-to-tail arrangement of bloodCirc_04651
tccttagctttcctggcaggactttatattcagagcacca

SEQ ID NO: 870 - DNA, 40 bp, Artificial Sequence
  sequence surrounding the exon-exon junction in a head-to-tail arrangement of bloodCirc_10064
ccttggtggtgacatcaatggttaaatcttcgtgaacttg

SEQ ID NO: 871 - DNA, 40 bp, Artificial Sequence
  sequence surrounding the exon-exon junction in a head-to-tail arrangement of bloodCirc_11243
cagaattatccgcaaatcagttcaactttagttggcttac

SEQ ID NO: 872 - DNA, 40 bp, Artificial Sequence
  sequence surrounding the exon-exon junction in a head-to-tail arrangement of bloodCirc_13939
ataagcttttacaaactgatgccactattgaactctgcag

SEQ ID NO: 873 - DNA, 40 bp, Artificial Sequence
  sequence surrounding the exon-exon junction in a head-to-tail arrangement of bloodCirc_20310
attcagcaaggaaccttccgggtgttctaaggatacattt

SEQ ID NO: 874 - DNA, 40 bp, Artificial Sequence
  sequence surrounding the exon-exon junction in a head-to-tail arrangement of bloodCirc_12027
agaactttgactgtgtagaggatttggtgctatggagaaa

SEQ ID NO: 875 - DNA, 40 bp, Artificial Sequence
  sequence surrounding the exon-exon junction in a head-to-tail arrangement of bloodCirc_05780
gattaaaacaacaccaccagtgctgttaacaaagatagac

SEQ ID NO: 876 - DNA, 40 bp, Artificial Sequence
  sequence surrounding the exon-exon junction in a head-to-tail arrangement of bloodCirc_23021
acaatctgattatatacatgagtgcttcgctcctggtgct

SEQ ID NO: 877 - DNA, 40 bp, Artificial Sequence
  sequence surrounding the exon-exon junction in a head-to-tail arrangement of bloodCirc_14612
ccatggagaagcataaagagttacacaacagggcatattt

SEQ ID NO: 878 - DNA, 40 bp, Artificial Sequence
  sequence surrounding the exon-exon junction in a head-to-tail arrangement of bloodCirc_12275
agctgagaaaaaccaaagaggacagtatttatgatgaaat

SEQ ID NO: 879 - DNA, 40 bp, Artificial Sequence
  sequence surrounding the exon-exon junction in a head-to-tail arrangement of bloodCirc_00568
cgagcaggacctggtgatagataacaataatgaaaagctg

SEQ ID NO: 880 - DNA, 40 bp, Artificial Sequence
  sequence surrounding the exon-exon junction in a head-to-tail arrangement of bloodCirc_08122
atacctttctaacagcccaagtaaaaaacatgaagcagat

SEQ ID NO: 881 - DNA, 40 bp, Artificial Sequence
  sequence surrounding the exon-exon junction in a head-to-tail arrangement of bloodCirc_01196
tcctgagtgtagtacggaagataattgtatggaagagata

SEQ ID NO: 882 - DNA, 40 bp, Artificial Sequence
  sequence surrounding the exon-exon junction in a head-to-tail arrangement of bloodCirc_08360
agattttgttagcaataatggctgaagacttgaagatgct

SEQ ID NO: 883 - DNA, 40 bp, Artificial Sequence
  sequence surrounding the exon-exon junction in a head-to-tail arrangement of bloodCirc_16383
cccatcttgcagatgtgtagaattcaactagagggcagcc

SEQ ID NO: 884 - DNA, 40 bp, Artificial Sequence
  sequence surrounding the exon-exon junction in a head-to-tail arrangement of bloodCirc_11998
gactaggacatctcaaaaaggcaacaagaatgggtgaatc

SEQ ID NO: 885 - DNA, 40 bp, Artificial Sequence
  sequence surrounding the exon-exon junction in a head-to-tail arrangement of bloodCirc_06802
tcgtacatcgagacctcaaggtgaagtatttgactatttg

SEQ ID NO: 886 - DNA, 40 bp, Artificial Sequence
  sequence surrounding the exon-exon junction in a head-to-tail arrangement of bloodCirc_08341
gataccaacactatttctcagcctaatttgtagatatcct

SEQ ID NO: 887 - DNA, 40 bp, Artificial Sequence
  sequence surrounding the exon-exon junction in a head-to-tail arrangement of bloodCirc_15592
tcaatgatcgtgtcatgagagttcttctgtgtggcagttc

SEQ ID NO: 888 - DNA, 40 bp, Artificial Sequence
  sequence surrounding the exon-exon junction in a head-to-tail arrangement of bloodCirc_02669
acgttgttagaatgtagcagcacccaggggcataacttgt

SEQ ID NO: 889 - DNA, 40 bp, Artificial Sequence
  sequence surrounding the exon-exon junction in a head-to-tail arrangement of bloodCirc_22521
atgatcaggttgacccttcaattttgaagccagcttcata

SEQ ID NO: 890 - DNA, 40 bp, Artificial Sequence
  sequence surrounding the exon-exon junction in a head-to-tail arrangement of bloodCirc_14172
attagaaaagaaattacctggaatctttctgacattgatc

SEQ ID NO: 891 - DNA, 40 bp, Artificial Sequence
  sequence surrounding the exon-exon junction in a head-to-tail arrangement of bloodCirc_22227
gctcctaccttggacgggagactgggccagtgccattcgc

SEQ ID NO: 892 - DNA, 40 bp, Artificial Sequence
  sequence surrounding the exon-exon junction in a head-to-tail arrangement of bloodCirc_21772
cattcattcaaatagctcaggaaatctatgctcctaaact

SEQ ID NO: 893 - DNA, 40 bp, Artificial Sequence
  sequence surrounding the exon-exon junction in a head-to-tail arrangement of bloodCirc_12762
aaagatcaactattacttggactgatggtgcatctgcaat

SEQ ID NO: 894 - DNA, 40 bp, Artificial Sequence
  sequence surrounding the exon-exon junction in a head-to-tail arrangement of bloodCirc_08619
cagaggcagctgaaaaaacatcactcagcctctgaagaag

SEQ ID NO: 895 - DNA, 40 bp, Artificial Sequence
  sequence surrounding the exon-exon junction in a head-to-tail arrangement of bloodCirc_01109
aaccaattctaactatcaaatgagaaagatcagtctaaag

SEQ ID NO: 896 - DNA, 40 bp, Artificial Sequence
  sequence surrounding the exon-exon junction in a head-to-tail arrangement of bloodCirc_18951
aagcaccgcacatttttcagccaaatttgtatcctactgt

SEQ ID NO: 897 - DNA, 40 bp, Artificial Sequence
  sequence surrounding the exon-exon junction in a head-to-tail arrangement of bloodCirc_01465
ggatgattctgattttcaaggggtagacttaaagtctgaa

SEQ ID NO: 898 - DNA, 40 bp, Artificial Sequence
  sequence surrounding the exon-exon junction in a head-to-tail arrangement of bloodCirc_03064
tgtttctgcaacagaaccacataagtaaagatcaaactct

SEQ ID NO: 899 - DNA, 40 bp, Artificial Sequence
  sequence surrounding the exon-exon junction in a head-to-tail arrangement of bloodCirc_19408
ggaaaaaacttgtttaatggattctttggatgggaagaga

SEQ ID NO: 900 - DNA, 40 bp, Artificial Sequence
  sequence surrounding the exon-exon junction in a head-to-tail arrangement of bloodCirc_21222
accaatactgttgcagattgatcatccagtcactcgatgg

SEQ ID NO: 901 - DNA, 40 bp, Artificial Sequence
  sequence surrounding the exon-exon junction in a head-to-tail arrangement of bloodCirc_21894
tggcgagttcgagaatccagagttaaacatgaagtttctg

SEQ ID NO: 902 - DNA, 40 bp, Artificial Sequence
  sequence surrounding the exon-exon junction in a head-to-tail arrangement of bloodCirc_17147
ttgtattggcagctagagagaaaatatttacaccagcagc

SEQ ID NO: 903 - DNA, 40 bp, Artificial Sequence
  sequence surrounding the exon-exon junction in a head-to-tail arrangement of bloodCirc_12555
caaactaagtcttaaacaaggctgttcacggaagaccagg

SEQ ID NO: 904 - DNA, 40 bp, Artificial Sequence
  sequence surrounding the exon-exon junction in a head-to-tail arrangement of bloodCirc_03671
tttttaccctatggaagggggttgaaatttataagagttt

SEQ ID NO: 905 - DNA, 40 bp, Artificial Sequence
  sequence surrounding the exon-exon junction in a head-to-tail arrangement of bloodCirc_15853
agaggaattccccctgctaggtatcattaatgggattgga

SEQ ID NO: 906 - DNA, 40 bp, Artificial Sequence
  sequence surrounding the exon-exon junction in a head-to-tail arrangement of bloodCirc_15700
cctagtacatttgcctgaagacctgtcgcgaaatcgcctt

SEQ ID NO: 907 - DNA, 40 bp, Artificial Sequence
  sequence surrounding the exon-exon junction in a head-to-tail arrangement of bloodCirc_03351
gttactagaagaaaaaacaggtaaagaagcttcttaataa

SEQ ID NO: 908 - DNA, 40 bp, Artificial Sequence
  sequence surrounding the exon-exon junction in a head-to-tail arrangement of bloodCirc_11660
attgttctggaatcatcacctgggagaactgaagtccaat

SEQ ID NO: 909 - DNA, 40 bp, Artificial Sequence
  sequence surrounding the exon-exon junction in a head-to-tail arrangement of bloodCirc_00498
gaagatctggcgcatgaatgtgtgttaacagggcacaacc

SEQ ID NO: 910 - DNA, 40 bp, Artificial Sequence
  sequence surrounding the exon-exon junction in a head-to-tail arrangement of bloodCirc_11490
gaacatgggcaggataaatggaatgggaatggaaggcata

SEQ ID NO: 911 - DNA, 208 bp, Homo sapiens
  full length sequence of bloodCirc_09611
atcaaagaaagtgcatcacagacaagggatgttctcaaacagcattttaatgatttaaagggaacccttggaaagctcctggatgagcgattggtgacccttttgcaagaggtggacaccattgaacaggagaccattaaaccactagatgactgccagaagctcatagaacacggagtcaacactgcagaggacttagtccgagaag

SEQ ID NO: 912 - DNA, 677 bp, Homo sapiens
  full length sequence of bloodCirc_04805
acttaattcagtgcacaaatgagatgaatgtgaacatcccacagttggcagacagtttatttgaaagaactactaatagtagttgggtggtggtcttcaaatctctcattacaactcatcatttgatggtgtatggaaatgagcgttttattcagtatttggcttcaagaaacacgttgtttaacttaagcaattttttggataaaagtggattgcaaggatatgacatgtctacatttattaggcggtatagtagatatttaaatgagaaagcagtttcatacagacaagttgcatttgatttcacaaaagtgaagagaggggctgatggagttatgagaacaatgaacacagaaaaactcctaaaaactgtaccaattattcagaatcagatggatgcacttcttgattttaatgttaatagcaatgaacttacaaatggggtaataaatgctgccttcatgctcctgttcaaagatgccattagactgtttgcagcatacaatgaaggaattattaatttgttggaaaaatattttgatatgaaaaagaaccaatgcaaagaaggtcttgacatctataagaagttcctaactaggatgacaagaatctcagagttcctcaaagttgcagagcaagttggaattgacagaggtgatataccagacctttcacag

SEQ ID NO: 913 - DNA, 3199 bp, Homo sapiens
  full length sequence of bloodCirc_06983
agaaatcacagagttgcaaatcctccctgctcagcttcatcagcacttaataccatttgctcgagctcctgggtgagagctacaaaactagtccctgagcccagtgggaggatccactagtccacaccctcgacctctgtcagcctcttcagccccttctcgcttgaggagaatgtgatcgttgttacaggcatcagaaaaaggcaagttgggggtaagcaccttatttttctcacacccctgccccttgtatttacccagtggtttaacctggtttgagccaacatcatcttgcctggattggcaagtctcctgattggtctccctgcttttcacttcatttcatttttttatcagaacatgccacacctctgctcaaaacctggttcacccagatttaaagctttactgtggtgtctacaagaccctcatgatcttacccccacccagtcacctctgtgactgacatttcatacaactctctttaattttgctcccgacacagggcctccttgctgttcgccaaacccagtcctacctgggcctttgctgtagctgatgtttgtgctggggatgccccgtgaccaactcccttcacctgcttcaagtcctttgctcatacggtaccttctcatagcagcttcttccaaccactcgatttaacacagccacctgccccttgccgcaactccttatctcactttccctgtgtttgtttgctttttcaaagcacttagcacctaacctacgaatttacctatgcagcccggtgtagattttctctctcccacccccgccccccacctccccgcgcttctcgttgtctaactagaatacgggcaccgaggcctttttgctcccagaggcctggaacagtgtctgggcacaggctatgcgctcagtgaacggttgttgaatggacgaattcttctttattgttattaagtatttatttatttattatttatttgagacggagtctcgctctgtcgcccaggctgaagtgcagtggcgcgatctcggctcactgcaagctccgcctcccgggttcacgccattctcctgcctcagcctcccgagtagctgggactacaggcgcctgccaccacgcccggctaatttttttgtgttcttaggagacacagggtttcaccgtgtcatccaggatggtctcgatctcctgacctcgtgatctgcccgcctcagcctcccaaagtgctgggattacaggcgtgagccaccgcgcccggccttatttatttatttatttatttatttttattgaaactaagtctcgctgtcacccaagctggagtgcggtggcgcgatctcggctcactgcaacctccgcctcccgggttcaagggattctcctgcctcagcctcccgagtagctgggacaacaggcgtgcgcgccaccacgcccggctaattttttgtatttttagtagacacggggtttcgccatgttggccaggctggtctcgaactcctgacctcaagtgatccaaccgactcggcctcccaaagtgctgggattacaggcgtgagccaccgcgcccggtctgaatggactaattcttaatgtcatccaagaggaaatcagaatatttagaaaggagccaggagccagggttcacccagggcgcggtgcagggttatctttttttgttgttgctttttgactcgctctgtcgcccaggctggaatgcggcgccgccatctcggctcactgcaacctccgcctccggggttcaagcgatcctcccgcctcagcctcccgagtagctggaacaacaggggcgcgcgccaccaacgcccggctaatttttgtattttttgtagagaaggggtctcgccatgttggccaggctggtctggaactcctgggctcaagcgatccgcccaccttggccttccaaagtgctgggatgacaggcgtgagccaccgccccctatcgggttatcctctttgatcacaaaacgggcaatttcttgagtccaagtcagaaatgaccagagggtactttgtggggccaccctgtgtgcgggggcggggaggggaagctccagtgccgcggggagaaggctgaacggcgtctgatccctactctggggctcccgggaggggcgccgcgtggctgccactgaagaggacccggcttcctttcttcaaactcaagactcttgagttttccttccagcgtcactacattcggctactagatagatattctgaggtggttcatgtcacttttactcaggaagacacgacaaacaaaagttaccacgatttcttactgaggtggtttcgcacttaacgtcagtgggcgaaaactcgcagcctcagttttcttttcttttcttttctttttcttcttttttttctttttgagacggagtttttactctgtcgcccaggctggagtgcagtggcgcgatctcggctcactgcggcctccgcctccccgattgaagcgattctcctgcctcagcctcccgagtagctgggattacaggcacgcggcaccatgcccagctaatttttgtatttttagtagagatggggtttcaccgtgttggacaggctggtctcgaactcctgacctcaagtgatccacctgtctcggcctcccaaagtgctgggattacaggcatgagccagcacccccggccttaatttttctttctcctcttcttcgattactattattttttttaaaatagagacaggtttccctatgttgcccaggctaatctcaaactcctggtttcaagtggtcctcctgcctcagcctcccaaagttgctgggattacaggcttgagccaccgcacccggccacaagtgccctttttaaataagctcctatttttttgttgttggttttgttgtttaattgttgtataaccggttttattccatcaaattgagttctctacaaaggatatcattttatacctgaccatggtttatccttttggtgagttattggttctctctctccaaatagcatcattattccctaaggtccaacgtcatacatgtgccaatttgtttcagcccggatgcttttccagtccactgtgaaactcactctctgccataccccttttctttcagaaggcatacaagtaccaactaggtgtctctttctccaaggagctccacaaaatattccatccagagtgcagatgatg

SEQ ID NO: 914 - DNA, 223 bp, Homo sapiens
  full length sequence of bloodCirc_11279
ggaacagtaacattcaaagatgtggctatcgacttcactcaggaggagtggaagagattggatcctgctcagagaaaactgtaccggaatgtgatgctagaaaactataacaacttaatcacagtaggctatccgttcaccaaacctgatgtgattttcaaattggagcaagaagaagaaccatgggtgatggaggaagaagtattaaggagacactggcaag

SEQ ID NO: 915 - DNA, 178 bp, Homo sapiens
  full length sequence of bloodCirc_09640
aggctgcctccattcgaaacattttctcagggacctacgttgcagttcactcttcgttggacaggagagaccaatgataaatctacggctcctattgccaaacctcttgccactagaaattcagagagtctccatcaggaaaacaagcctggttcagttaaacctactcaaactattg

SEQ ID NO: 916 - DNA, 152 bp, Homo sapiens
  full length sequence of bloodCirc_00725
acaaatttacatgtattggagaccagaccagaagcccttctgaattaagatctcacattcttgaaggtggcattgaagagcactaagatcggaagatgagtgagcttgaccagttacggcaggaggccgagcaacttaagaaccagattcga

SEQ ID NO: 917 - DNA, 169 bp, Homo sapiens
  full length sequence of bloodCirc_17120
aaagtgactgagaccgaagatgatagtgatagtgacagcgatgatgatgaagatgatgttcatgtcactataggagacattaaaacgggagcaccacagtatgggagttatggtacagcacctgtaaatcttaacatcaagacagggggaagagtttatggaactacag

SEQ ID NO: 918 - DNA, 183 bp, Homo sapiens
  full length sequence of bloodCirc_00155
gtgattttcgatacacaccatccatgctaaaggagccagccctgacactggggaaacagatccatactttatacctagacaacaccaattgcaatccagccctggttcttccttcccgacaagaagctgcccaccagattgtccagctcattcgaaaacacccacaacataacataaagattg

SEQ ID NO: 919 - DNA, 286 bp, Homo sapiens
  full length sequence of bloodCirc_18778
ggattgagtgttgctatagtgggacccacgtttcaagatttggcaacaaacgtgaaccgaaatatcagtagtctgtctttcatttttgtgggtcgtgccttgggatatttgagtggctctgtgattggtggatttcttgtcgatgtcatgaattattttttacttttgggaatctcaatgtcggctaccaccgttggtctttatcttgttcctttttgcaagacagcaatattactcactgtcatgatgtctatcttcggtgtttcaattggcattctggatacag

SEQ ID NO: 920 - DNA, 226 bp, Homo sapiens
  full length sequence of bloodCirc_09544
tagtttatgccaacgtgacttcattcatacagatgaaccaaggatcgggatagcagtataaaattagaatcaagacagctgactgctcagcaggatgccatcaactaacagagcaggcagcctgaaggaccctgaaattgcagagctcttcttcaaagaagatccagagaagctcttcacagatctcagagaaattggccatggaagctttggagcagtgtatttt

SEQ ID NO: 921 - DNA, 154 bp, Homo sapiens
  full length sequence of bloodCirc_15325
gtttatcaggtagaagatgtgtgtgaagaagaaatgccagaagagtcagatgaatgtgtccggatggatagaaccccaccaccacccactttgtctccagcagctataacagtggggagaggagaagatttgacttctgaacatcctttgttag

SEQ ID NO: 922 - DNA, 883 bp, Homo sapiens
  full length sequence of bloodCirc_06048
gaaacatttctttgattgtctttggcatcctgaaatctctggcccaatagagtttttattttctttgttgattaaatgatagtgtgcatgcctgtttcttggaaatgcctaataatttgaggtatgcagacctaattttctggaagcattacaaaacctagtcttgtgggatcacacactgtgctcataaatcagtctgtatttgggttctatatttgtgtgtgtgtgtttgtctttttgcctgtaggatgtccctcactacatttcttgtgtctgtagtaggcttatttgtgtactgcaggtgggatggtaagtatgtgaagaaaagggctctggtgagtggcctttggagacaattacgttttatttcattttttaaaaaatgtattgaatatcgggtttttcactgcaaggccttcttaaaaagtgaaactaattagattgagtgttaatgccaagagtgtagctgtaaatattaaccctacagctaccatacattagtgggcacacaagtattttgatctttttaaacccatcatcttatcttacagatgtaccattatatttgctttgttccttgcatagtgtctttccttttccttctatttgttttcaatatgaattatattagtttattatcttagccaaggttttattttggcatattgtataaagaaattcattttacacagtaaatcaataaatagatccttgaccttattccagtttcatataaaggccttgcagtggaagatcttttatgagatatttgatggaacagactgactgagaagatttccttcctcttttctccccctttccttttttctccccattccaatttcttctctctcacaggtcaacccctctgcttctcaccccg

SEQ ID NO: 923 - DNA, 198 bp, Homo sapiens
  full length sequence of bloodCirc_17070
tggctagatgattgtaagaggacatttggtgccaaagaagacatgtataggataaacacagatgcacaacaaatggaaatactagcagaattggagctctgccgaagattatacaaattgcattttcaattgctgcttctgttccaggcctactgtaaacttatcaaccaagtaaatacgataaaaaatgaagcagag

SEQ ID NO: 924 - DNA, 312 bp, Homo sapiens
  full length sequence of bloodCirc_05238
gcatccaaacaattgactctacccaggctctgttccttccaattggagcatctgtctctcttttagtaatgttcttcttctttgactcagttcaagtagtttttacaatatgtacagcagttcttgcaacgatagcttttgcttttcttctcctcccgatgtgccagtatttaacaagaccctgctcacctcagaacaagatttcctttggttgctgtggacgtttcactgctgctgagttgctgtcattctctctgtctgtcatgctcgtcctcatctgggttctcactggccattggcttctcatggatg

SEQ ID NO: 925 - DNA, 330 bp, Homo sapiens
  full length sequence of bloodCirc_17655
aatgaagatgataaccgagccagtgagagcaagaaacccaaaacggaggacaagaattcagcaggccataagccatccagcaacagagagtcatctaagcagagtgctgcaaaagaaaaggatttgttgccttctcccgctgggcctgttccttcaaaagatccaaaaacagagcatggctctcggaagaggactattagtcagtcttcttccttaaagtcaagcagtaacagcaacaaggagacgagtggcagcagcaaaaacagttcctccacatcaaagcagaagaagaccgaagggaagacttccagtagctccaaggaggttaag

SEQ ID NO: 926 - DNA, 873 bp, Homo sapiens
  full length sequence of bloodCirc_01651
caacatcatgacaacagagaagagtttagtgactgaggccgaaaattcacagcaccaacagaaggaagagggtgaggaagccataaactcaggccaacaagaacctcagcaggaggaatcttgtcaaacagcagctgaaggagataattggtgtgaacagaagctgaaagcttctaatggagacactcctacacatgaagacttgaccaagaacaaggagcggacatcagaaagcagaggactttcacgactattctcctcgtttctcaaaaggcccaaatctcaggtgtccgaggaagaaggcaaagaagtagagtcagataaagaaaaaggtgaaggaggtcagaaagagatagaatttggaaccagtcttgatgaagagatcattttaaaggccccaattgcagctcctgaaccggaactcaaaacagacccatctttggatcttcattcattaagcagtgcagaaacacagcctcaccattacaattaagaattattttcagagtcttcttatttctgaagcatgtgaatattatctgcatcgttaaaagtcctgctcaggaagaactcagagaagatccagattttgaaattaaggaaggagaaggacttgaagagtgctccaaaatagaagtaaaagaagaaagccctcaatcaaaagcagaaacagaattaaaagcttcccaaaaaccaatcagaaaacacaggaacatgcactgcaaggtttctttgttggatgacacagtttatgaatgtgttgtggagaaacatgctaagggacaagatttgcttaaacgagtatgtgagcatctcaatcttttggaagaagactattttggtctagccatttgggataacgcaacctctaag

SEQ ID NO: 927 - DNA, 325 bp, Homo sapiens
  full length sequence of bloodCirc_11479
tgaaggagaacgacctgctcagaatgagaagaggaaggagaaaaacataaaaagaggaggcaatcgctttgagccatatgccaatccaactaaaagatacagagccttcattacaaacataccttttgatgtgaaatggcagtcacttaaagacctggttaaagaaaaagttggtgaggtaacatacgtggagctcttaatggacgctgaaggaaagtcaaggggatgtgctgttgttgaattcaagatggaagagagcatgaaaaaagctgcggaagtcctaaacaagcatagtctgagcggaagaccactgaaagtcaaagaa

SEQ ID NO: 928 - DNA, 253 bp, Homo sapiens
  full length sequence of bloodCirc_17787
accccaagactgcttctgagacagaaacagatatctgtgctgaatgggagataaagaccatcactagtgctctgaagacctacctaagaatgcttccaggaccactcatgatgtaccagtttcaaagaagtttcatcaaagcagcaaaactggagaaccaggagtctcgggtctctgaaatccacagccttgttcatcggctcccagagaaaaatcggcagatgttacagctgctcatgaaccacttggcaaa

SEQ ID NO: 929 - DNA, 767 bp, Homo sapiens
  full length sequence of bloodCirc_20940
aacatccatgatagcagtcttctgtaaatcgaacttttcaagaattctctgaaggaaccaagtaggatattcttacatcatgacttaatgtgaatgcaagaacaagaaataggttttatctctaaatataatgaagggctgtgtgtaaacactgaccctgtctcaattctaacaagcattttagacatgagtttacatcggcaaatgggttcagatcgagatcttcagtcctctgcttcatctgtgagcttgccttcagtcaaaaaggcacccaaaaaaagaagaatttcaataggctccctgtttcggaggaaaaaagataacaaacgtaaatcaagggagctaaatggcggggtggatggaattgcaagtattgaaagtatacattctgaaatgtgtactgataagaactccattttctctacaaatacctcttctgacaatggattaacttccatcagcaaacaaattggagacttcatagagtgccctttgtgccttttgcggcattctaaagacagatttcctgatataatgacttgtcatcacagatcttgtgtggattgcttacgacaatatttaaggatagaaatctctgaaagcagagttaatattagttgcccagaatgtactgaacggtttaatccccatgatattcgcttgatattaagtgatgatgtcttgatggaaaaatacgaagaatttatgcttagacggtggcttgttgcagatcctgattgtaggtggtgtccagctccagactgtgg

SEQ ID NO: 930 - DNA, 280 bp, Homo sapiens
  full length sequence of bloodCirc_10338
aaacatccgaaactgaaatcacaacaacagaaataattaagaggagagatgttggtccttatggcattcgatctgaatattgtatcaggaaaatcatttgtcccattggagttccagaaacaccaaaagaaacgcctacacctcagaggaaaggccttcgatcaagtgcactgcggccaaagagaccagaaacgcccaagcaaactggccctgttattattgaaacctgggtagcagaagaagaactggaattgtgggagatcagggcatttgctgagag

SEQ ID NO: 931 - DNA, 177 bp, Homo sapiens
  full length sequence of bloodCirc_14397
ccgtgtggttttgccatgttctgttcaggagtatcaggttgggcagctttactctgttgcagaagctagtaagaatgagactggtggtggagaaggaattgaagtcttaaagaatgaaccttatgagaaggatggagaaaagggacagtatacgcacaaaatttatcacctaaagag

SEQ ID NO: 932 - DNA, 185 bp, Homo sapiens
  full length sequence of bloodCirc_09432
gcagagctgcaaccctcttgtcctctttgaagcagaaattgaaaagtactgcccagagaattttgtagacatcaagaaaactttggaacgagagactcgccagtgccaggctctggtgatctggactgactgtgatagagaaggcgaaaacatcgggtttgagattatccacgtgtgtaaggctg

SEQ ID NO: 933 - DNA, 193 bp, Homo sapiens
  full length sequence of bloodCirc_01741
gtctggtccatcgaactcatatgtcatcctgtcgggtggataagccctctgagatagtagatgttggagataaagtgtgggtgaagcttattggccgagagatgaaaaatgatagaataaaagtatccctctccatgaaggttgtcaatcaagggactgggaaagaccttgatcccaacaatgttatcattga

SEQ ID NO: 934 - DNA, 3417 bp, Homo sapiens
  full length sequence of bloodCirc_15327
tttatttaggaaagggaaacagatgggaatattggactttattgaggtaagtttggcagtctttgttatttttagaatagttatagttatgagctaaacagtaattgtgatgtgcagtttcctaatgatcttgtgagtgagcaaaacctccactttgcttttttcaacattttaattgttgaacatttagatttgttaatgctgattgtgccagatgtctgtgacagatttgtttttgcctacttcttttattcatgcacttatttcgcctttatatgagagttctggaagtacatatagttagctttaagtataatgagtggaaagtattttacagtatttgatggattatttcaaaatatgctatttgtgttatggctcttttcattctttaaactcttgtttttaaaaatcagaattctatgtatgatcaagctttgatttcttaaaagatactctagcagatgtttgaataacatgtaactgcattaggattaaagagagtttcagcattttaagcaaagatcatgttctttggaagaaaagtactatctattatactgaaggaatgctacatagataaaattgaactggtcgataaaaccatacttgtttaattatctctgaattaacatctctgacactaaggcaaattaaagtattcactgtgacagcacttgcccttggggactagattttttttcttaaccccccagacactttttagaatgattttacctatattgggcattatcatcatttaaaaaactgttattatcatgaaccgatctagtataattgttgctccgaacaataacaaatgactgctttcacgtctgagattcaggcatgaggcacagaatctctcttagtgtaactggtttccaggtgcagggttgtgagcaaataactttaaaaaatgttgcctactttgtagctgattcagatcacagttctgaattttatatttggtataatattatgtttgatataaaattatccagtaacagtagaattttaaagttgtacaaaagacaaaagaagatgttttattcttagtggagccttggaaagatttttattttattttattttatttttgattgtcacctattgttacctttataacttactgttatatccttataggtgaaacttgattgtcccttttacaacacatgggttttgctggtttcagaaatcctgatcacttttatgtataattttatatactttaaaacatcagacttttaaaatagtttgattaaaaatgtacacaatattagatgttgctgaaaggtttcttgtgaatgttgaaagtttgtttgttaacatttgtggggctaggtgtgcagtggctcatgcctataatcccagcactttgagaggccaaggcaggaggatcacttgagcccaggagtttgagaccagcctgggcaacatagtgagacctcatctctacaaaaaacattttaaaatgagctgggtgtgttagtgaacacctgtggtcccagctactcaggaggctgagcttggaggtcaaggctgagtgagccataatggagccactgcactccagcctgggcagcagagtgagaccctttctcaaaaaacacttttttaatgggaagattagtcagtatggttaaataagattttaaaaactcataatttttgtaaacttaagtaataagctttatagataaaagaagggaaatgaactcttatggctttatttttagtaatcatttttcataaataatggttaagtaaataataaatgataacaaattaaattaaaatacccatgtcaacctctagaagtgttctttgaaatggaaacattaataataaggtattggccgggtgcggtggctcacgcctgtaatcccagcactttgggaggccaaggcaggtggatcacgaggtcaagagatcaagaccatcatggccaacctggtgaaaccctgtctctactaaaaagtacaaaaaattagctgggcatggtggcacgcgcctgtagtcccagctactcggggtggctgagccaggagaatcgcttgaacccaggaggcagagattgcagtgagctgagatcgcaccactgcactccagcctggcaacagagcgagactctgtcaaaaaaaaaagtatttctagttacatagctccttctcagggtgccttcgattccattttcctttttcttttttttgagatggagtctcactctgttacccaggctggagtgcaatggcctgatcttggctcactgcaacctctgcctcccaggttcaagtgatgttcttgattcagcctcccaagtagctggaactacaggcgcccgccaccatgcctggctaattttttgtatttttttaagtagaggtagggtttcaccatgttggccaggctgttgtggaactcctgacctccggtgatccacccacctcagcctcccagagtgctggattgcaggcacgagccactgcacctggccccattttccttcttaagtataatctttacaattggataacaaggtggttaagttatagacttaaaaactttctcccataagtatggaacattataaaaagagtaaaaaaataaggtgtcaaagagcttaggctgtgtgtgtgtgtgtgtgtatgcatttcaaggaaagatattttctgtttgcatattatatataaagagtcattagattgttgagtagaacagaaaaggagagatataattgcgtatctttttttgtagattctcagatgttactttttataatttaatctttaaattacataataataaggaagagcctgggatagaatcctacatgtcctaatatagtgtgtcattgtaggaattcgcttagtgtgcttatgaaaaatgttagtatctgttttgattcatgacagttagaagttaacaaaaacagttgaattcccaaaatcgttattttatttgtattttttaattatcgaaataaaaaatattttcagacttgactaccatctttttggaaaccttggtgatttttggtctagatactgatccacagcttgctttcagtcaaatattatgaagaaatatgaaaaacttcattcgagcaatttttaagttttcctttcagtctgttagagtagtcatttttgccttgtttttaaatttaatacacatagaatttaattttctgaaattaagaacacctgataaaatatagttttggaaacattttaaggcagtatggtttgtcattgcaggtttatcaggtagaagatgtgtgtgaagaagaaatgccagaagagtcagatgaatgtgtccggatggatagaaccccaccaccacccactttgtctccagcagctataacagtggggagaggagaagatttgacttctgaacatcctttgttag

SEQ ID NO: 935 - DNA, 209 bp, Homo sapiens
  full length sequence of bloodCirc_01556
gaatgtgcggcaagaggagaagactatgagaaagtgaagttgctggagatcagtgcagaagatgcagaaagatgggagaggaaaaagaagaggaaaaaccctgatctgggattttcagattatgctgctgcccagttacgccagtatcatcggttgaccaagcagatcaaacctgacatggaaacatatgagagactgagagaaaaaca

SEQ ID NO: 936 - DNA, 494 bp, Homo sapiens
  full length sequence of bloodCirc_18274
aatatcctccgaatcctaaatctagagctccaaggatgctggtcattaagaaaggtaatacaaaagacttacagctatctggattcccagtagtaggaaatcttccgtcacagccagttaagaatggaactggtccaagtgtttataaaggtttagtccctaaacctgctgctccacctacaaaacctacacaatggaaaagccaaacaaaagaaaataaagttggaacttctttccctcatgagtccacatttggcgttggcaactttaatgcttttaaatcaactgccaagaactttagtccatctacaaattcagtgaaagagtgtaatcgctcaaattcctcttctcctgttgacaaacttaatcagcagcctcgtctaaccaaactgacacgaatgcgcactgataagaagagtgaatttttgaaagcattgaaaagagacagagtagaagaggaacatgaagatgaaagccgtgctggctcagagaag

SEQ ID NO: 937 - DNA, 205 bp, Homo sapiens
  full length sequence of bloodCirc_20658
gtaagaaagcaaacttaggtaaaaatgcaagcatgaacacacaacatggaacagcaacagaagttgctgtagagacaaccacacccaaacaaggacagaacctatggtttttatgtgatagtcaaaaggagctggatgagttgctaaactgtcttcaccctcagggaataagagaaagtcaacttaaagagagactagagaagag

SEQ ID NO: 938 - DNA, 202 bp, Homo sapiens
  full length sequence of bloodCirc_20552
gaccttaaagaagccaacttcgacatcaatcagctatatgactgcaattgggttgttgtcaactgctccactcctggcaacttcttccacgtgctacgacgccagatcctgctgccattccggaagccgttaattatcttcacccccaaatccctgttgcgccaccccgaggccagatccagctttgatgagatgcttccag

SEQ ID NO: 939 - DNA, 225 bp, Homo sapiens
  full length sequence of bloodCirc_03293
gtaagaattctctacgcctgtggttttagcgttttgttgaccagctatacacactctgctgttgacaatattcttttgaagttagccaagtttaaaataggatttttgcgtttgggtcagattcagaaggttcatccagctatccagcaatttacagagcaagaaatttgcagatcaaagtccattaaatccttagctcttctagaagaactctacaatagtcaa

SEQ ID NO: 940 - DNA, 556 bp, Homo sapiens
  full length sequence of bloodCirc_22764
gttgcacagagcattgaggatcaccatcaggaagtgattggtttctgcagagagaatggtttccatggcttggttgcgtatgactctgattatgcactgtgcaacatcccctactatttcagtgcccatgccctaaaactgagccggaacgggaaaagtctcaccacaagccaatatctgatgcatgaagttgccaagcaactggacctgaatccaaatcgttttcctatttttgctgctctcttaggaaatcacattctgcctgatgaagatctggcttcctttcactggagtttacttggtccagaacatccactagcctcactaaaggtccgggcccaccagctggtcttgccaccttgcgacgtagtgatcaaagccgttgctgactatgtacgcaacattcaggacacctctgacttggatgccatagctaaagatgttttccagcattcacagtctagaacagatgacaaagttattcgatttaagagagcaattggatattattcagcgactagtaagcctatgtcatttcatccaccacattacttag

SEQ ID NO: 941 - DNA, 179 bp, Homo sapiens
  full length sequence of bloodCirc_15662
ctcctaaaagacgacggcctgcacgttcaatttttgatggtttccgggattttcagactgaaactattcggcaagaacaagaattaagaaatggaggagctatcgataagaaattaactacccttgcagatctattccggccacccattgatttgatgcataaaggcagctttgaaaca

SEQ ID NO: 942 - DNA, 188 bp, Homo sapiens
  full length sequence of bloodCirc_04222
agattgaaaccaacaaatccagcagcccagaaggctcttactacacctactcattataaactgacaccccgccctgccactagagtccggccaaaggctttacaaacaacaggcacagccaagtcacatctctttgatgggctggatgacgatgaaccatccctagccaatggagcattcatgcccaa

SEQ ID NO: 943 - DNA, 246 bp, Homo sapiens
  full length sequence of bloodCirc_08121
gactgtgaattggagaatcaagaggcacatgagcaagatggaaatgatgaactaaaggactctgaagaatttggtgaaaatgaagaagaaaatgtgcattccaaggagttactctctgcagaagaaaacaagagagctcatgaattaatagaggcagaaggaatagaagatatagaaaaagaggacatcgaaagtcaggaaattgaagctcaagaaggtgaagatgatacctttctaacagcccaa

SEQ ID NO: 944 - DNA, 264 bp, Homo sapiens
  full length sequence of bloodCirc_13514
ctgtataactttcttcgattttgtgagatgcttattaagagaccatgtaaagtaaaaactattcaccttctcacctctctggatgaaggcattgagcaagtgcagcaaagtagaggcctgcaagaaatagaagagtcactcaggagtcacggagtgctgttggaagttcaatactcttcttcaatacatgaccgagaaattaggttcaacaatggatggatgattaagattggaaggggacttgattattttaagaaaccacag

SEQ ID NO: 945 - DNA, 170 bp, Homo sapiens
  full length sequence of bloodCirc_22065
gaagttctacagactttgaccaagttttgtttccccttctatgtggacagcctcacagttagccaagttggccagaacttcacattcgtgctcactgacattgacagcaaacagagattcgggttctgccgcttatcttcaggagcgaagagctgcttctgtatcttaag

SEQ ID NO: 946 - DNA, 68143 bp, Homo sapiens
  full length sequence of bloodCirc_21136
gatgccggaccagatctctgtctcggagttcatcgccgagaccaccgaggactacaactcgcccaccacgtccagcttcaccacgcggctgcacaactgcaggaacaccgtcacgctgctggaggaggtaggtcgggccgggacccccgccgtccacgctcgccgctgccgccgcgcagctggaggatctcctctccgagctgggaggaaggggacgcgggggccgggggcgccacaccccctcagggagccgccgggtgaataagggacttcggacgggcggcgccttccccatctcctcgccctttctgggtcttgcgggttgaaaggcctggggactggaggtgggagaggactgagcgagctgtggacactccagggaggacagaagatggaagtcctgtccctggcatgcactgttcggcgcttccacatcttcgtgaccctcctgtaaccctcgaggtaggtggcgtcaggccaccgagggcccagaggcgaagtagtgcagccaaggtcaccagcaagggactaggagatgggcagtgaacgcacccctcagcggcccgactggaccaggcaggcgtagctgcggagacgagggccgttggaaaaatcccagaggacccagagagaactcaggctgggactgtatccactccaggagtcctccctgttagtctctggtgcctgaagcccagatggaaagagatctgtgcacataggtttccacccggcttccctaacccggagggtttggtagggcttagggctgctgcgccagcaggacctgcccgcagggcactccgaggctggacaaggagatcggaggccggtgcagcctgcttgagctgaccagacacggagaagggaggcccgaggcgacagtcagacagctcctcttacctggacccttcaggaaagcgttgctggtggggggtggggggcagggccaaggccaaatcgattttctttaggattttcagtgagttaatgagagagtggtatgggcaaagaggaacctgaaagccaaggagcagcagaagcctctggggccacgataaaaataggatatttgcccaggaactcagcatcatcaataagtgccataaagcatccctccccttcaaacaaggcaaacgtatttcaactgaaaatggcaccattgggtggaaagtaggaagggagatggttttccctgggtgggttatgctgtggctggtttaggtgaggtttggggagctctttctgatgtaagccccccaccccaaggacggacctctgtaatatggggaagcttgggcttctgtgggccgactcatcttgaaatgagctttgatactcatgtttccacacacgtagaactgggattcagaagtagagggatcccaaattttaggaggagagagacttctgttagtgctgggtcccatctggcctgcttggtgctatgactgaatgtgtcattccggcatacttccagagttctctctggagtcagtattgggtgatgggactgaattgtgaagtgaatggagaaataccacctaactaggtttgtttgaaaaccagaggtaaatggattttttcttttcttttttctttttttttgtctttgtgaactgccagtctgttatactcgtctgggattaaacagaattgccaggcattgaaccccatcatgggtctgtctttcacttaattgtaataaattgaaacatgttgatacaggagcattttgcatcccctttctgtactaattgtatatacttctaaggatgtgacattgattagactgagtggttattttccttctagataagtttttcagtgcctcctaatagagctgccagttattttaacgttctcttcctgcacatttagatagtgttgctgtattctgtttgtgaagggtgtgataagattaagtattcggtgatgctgtttgtagaggtatgcgagcatattttccagcaaccctgtagtagagggttaatgttaaattacatgcagttgctgttgatgttagtttaaggttaataaatttaaaagcaaatatttttttttatgagaaatactgttgtaagattaggtagaaaaatagagttaactataatgcaagtgtagtcacttaggaacttggaaccaggctagaagttcagtgtcatgttagagtacattgatgatacccatgttctcaaaaatatagcaatgtttcaggatggcacaataattttacaatttttattctgaacttgaggaaggtattggccaggaaaacattgtctccggtcggcatattttaattcttgaggttgcactctcttgagtggttactttttgcatagatgtgaaaagtatgctttaggtttttttactgaaggatagccaccatagttgaattttaatttttcccccatgcttacatatgtggaagtagtgcattattataaatatcttaggtgggtcacaattcagttctttaaaaatatgggacttaacattaccacactcaatataagaaaaaatttgggggcataccacaaaatcttgttggcatatgcttcacaactgagatatttggaaactttaagaatgtggcttgtgttattttgtggttattcttaggaagagaacttttgggtactttttggtgatatggaaactccggaataggaattaatttgggtaacttggaattctcatttaaaaaaaacattttcctagttctagtaagtaccttcctgttgatgacctttttttgctctttagatcactaatgcacatacatagagcgcaactgaaaaactgttagatctccaagattggagccccaaattaatccatactctttcttttactatgtctccttggtagagattgtggtgtgttgtgcagatgttgatgcttttagttaaatctctgtgatgagcactcttggaagtagatgagaaatatatggtaagaaggctgggcgtggtgggtcatacctgtaatcccagcactttgggaggctgaggcaggtggatcacttgaggtcaggagttcgagaccagcctggccaagatagggaaaccccatctctactaaaaaattagccaggcatgatggcgcatgcctgtagtcgcagcttcttgggaggctgaggcaggagaatcatatgaacccgggaggccgaggttacaatgagccaagatcgcaccactgcacaccaggttaggcgacagagtgaggctacgtctcaaaaatggtaagaagaggcaaagaggagtttacttctggtttacttctgggctttaccttttggggcgaagggtcacacatggctcaggggttcacggtttggctggcacacaatgagtggctaccttggggaggcaggaatggatgagctggtgttctgccaaggtttcatcctggcgtgtgagtgttttccaagcaaaaagccagtgttttacttattcagcagtgaaagcacactgatgtgtgccattttactcttgacaatttttaagttatgagtaagtgactaggagagcataagcgttttccctaaacgggagcaggcaggcattttaggactgctgtgacccagacagtagaagggaccctctatttaaagacttagagtggctaatacttagtacctttgtcagagagagagtccaacatgataaatggaagtctacttggttattttatattgggccacattttaatttggtgacaatgaaggaggcaagttctgctcatttattgagcagctgctccataccaggcctgctgtcgacacatggcatgaatgcttacatttacctctcatatgagctctctgaaagaggaacatttatcgtttccattttatagagaaggaaattgaggcccagagagatgaaatgatttctctctaaggtcaagtggctagtaaataaaatggaatttaaaaatctccctcccggctgggcgcggtggctcaggcctgtaatcccagcactttgggaggccgaggtgggcagaacacgaggccaggagatcgagaccatcctggctaacacagtgaaaccccatctctactaaaaatacaaaaaaaaattagctgggcgtgttgtcaggcgccttgtagtcccagctacttaggaggctgaggcaggagaatggcatgaacccgggagacggagcttgcagtgagccaggatcacgccactgcactccagcctgggcgacagagcaagactccgtctcaaaaaaaaaaaatctcactcccttctctccgtgaaacaggctctctcactctgtcgccgaggctgcagtgcagtggtgcgatctcagctcactgcaacctctgcctcccaggttcaagcaattctctcacctctgcctcctggggcagctgggactacaggtgcacaccgccatgcctggctaatttttgtatttctaatagagacgcagtttcatcatgttggccaggctggtctcaaactcccgacctcaagtgatctgcctgccttagccttccaaagtgctgggattacaggcatgagccaccacgcctggcccagagtttagaaatcttaaaacagttgagacataaaataggtattctaaatgtctacaaaaacatatttcagtggctttatagggaacataggagactttgctgtcattgcaccttcaagttttggtctgattaaaaaaggtgcctaagttccttggaggcttagtgtttcttcatgtttatatttcagagttcttaatagtgatacttaaatatactattttttccctgtactttcgaagatttggatatgagttttcagatttaaatgtgggaactcatttgagtataatccgtgaacagcatttgttcaacacatttttggggaggccctgctatatacaagtcattttccaagtcctactgaggtattggggttatccagattgtattatggagaagctagtggtctttaagaaataaagaaataaggctaaaactctttaacagggtagaaaggggcagttcataggggagggaaatagtatagaacattcatcctaggaatacaagtgaaatcactcaaattaccatgtagtcaatatacagattgttcagtgcctcctatgtgcccagcagtgtgctaggcccagggatacaatgaagaagaaccctgccctcaaaaaatgcagcctaaaagttttcttatggaaactggaaatcaagtttgggtctggcattagaggcttttcttaatgtattcacctggtgtgttcagttatttctgaagatatagaaatgtttgatgaaatgaatgaagatacagaatgtagattcagtatcaagctctatctcataacagtaacattcctactacatgcaaaccctatacatactattatttaataccttttttcaccctactatcatcaatggctccattttatagatgaagaaattcaggattacagcagttaagtattttgtccagctaggtcgtacagccagtaagtattctgcccaggtcatacaaccagtatcagatttgtgattaatcgcattactgtcaagtcctcatgcaggccagtcagacttctgtgtgtgttccctcaccttccatttaagtttcagcctttatctatgtccttttgggtgtctgccatgctgatgatagagctcatcagtctttgataaatactgttaggtccttaagtgattttctgtgaaatcttacgcataggatttctgtggtcagggtttgacgtctgatcttgttcgtcagctccccttgctcaagaatgcaagtgcattacctcttaaattttaaaagctggtaaacttaataggaagtgcttctttatattgcaggtgctaaacttaaggagcccattaattacccccaaggagattgtagtcttaaaaaaaaaaaaaaaaaacccttaggaaggatttagctaaaatcaagatttatacttttgcttaatgtagagaaagtatgtttgggtctgtctctgacctcttgaagataatacaacaaaaggcaaacaaaccttcccataatgtttctctcccacacacaagtcaaggctctgtgcccaggcttttgacccagtctggaggtacttaggatgaggttttgtctggatgaaaccagcaaaggtcagtgagtgaatatatctgtctgtagaatcaaagggagaaggaaattgtatatgttggaactcatgctctttctaaaacaaggcacaagcctgttagccagatattccatgctaatgcttttggtcctgatatggtttggatttttgtcccctccaaatctcaagttgaaacatagtccccagtgtcggaggtggggcttggtgggatgtgattggatcgtgggggcggatgcctcatgaatggtttagcatcatcatccccttggtgataagtgagttcttgctcaattagttctcttgagatccagtgttttaaaagtttgggtctccacttttctctctctctcgcccctgctttcgccatgtgatgtgcctgctcccacttctcctcctgccatgactaaacactccctgaggcatccgcagaagccaagcagataccagcgccatgcttgtacagcctgcagaatttcctttctttataaattacccagtctcagatattcctttataacaacacaagaactgcctaacacaccttatatatatatctttggatttaaaaaaaacattttttacacctatcatctaataaaagcttattctagtagcattcttattattgctttacatatgaatacataaaggctcacagacattaaataacttgtccaagatcacacagtggtaaatggtagacttgggctctgaatgcagaatctgcattgaaaacccattccgtttcttctgtatttcactgtcttttatgcttcctgtctgccagtttgttttgtcttgcaggacccgtgagaaaggcatctattaattatctttttacctctatttggtttctagtgctagagagaaagagtttgggagagggaagaaaaatgaaaagatagttgcttttctctgttcttctgagacctcttgctggacccctcagtaaatctctgccttttgtgatcaaagacagtgctgcaagcaatcctccttggactgggcagatgtgaaaatgaccctgttgcttccagctccaccctggcatgcttagtctgggactgttgacccaacctgatttgcctatgagctgcccagagccctggctaaagaaccactactctcagttgcagtttcttcagggctgtctggctgtctgcttccagcttcctggctgtacaagagccctgagtttttgctgggtgttagttattcagggaattgccaagtgtccaagtaaaagcgaccttggagaatatctactctggcgtttgccaacctgaaagcctgatctccaaaaggctcatgaaagctgtgatgggggtctgtagccactttgtggaaaaattagtggacactgctagtaacttagtttggcataactctcatgccaaatgtgtttgattttggctgaaatgcatcagctcagtggtgtaggacgaatcatcttctgctgatcagatgcttggattgccagttataaagtgggaaagcaaagtgttacctcattgaggtgattggcttcctagaagggctttgtatctccacgggaggaacctcatgaatgatgggacccaccagatctagtttagtcctcattgctttgagaggtggagactgaggcccaaagatgagacagaaaccatgcagggatttgaattcagggctgcccaacccagggatttttgcactctgctgtttaacagggttgtggggactggcaattcacagtctgggagtcctccccagtaccactccatgtaacttgcttctaggtggaaagagtggagagtaaaccttaagtttggaactggatcttgctagcccagtctgctgtcattaagtcctggtctcagaagacacactgtgcgaggccgcagtagctttccctgatgttaggctagcagcctttcattagaagccatttgtggtgttggatgttcaaacactacccagacctttgccttcattgtctgtttgtccagggagcctcagagagatggtttccatatatgtaacctagtcatttggggactaaaaccagatctgggtcttggccattcccacatgtattacttaaacatgagtaaggtttggggctacacttcatgtctaagcctctgtttccccatttgataaataaatgacattgctttttgagtattaaaggaggcaatgcatgggaggcactcatcaaatgactttatgtgtcagtaaagtatgtccctatgggtgtcaaggtctgactactcagctctcctgtgaggcagggaagaaggggaggcaaatgaggctagaagcattccttcatggagagttagataggtaggactgctctctactgaggaccagtggcaacacttgggttgaggagggtgaaattctcttgccaaggttaattgtatccctattacttctagcgtgtgttgggcaagttactgagccttactgtgtcctactttcctcatggggataagtacctacctctcagtgagtcagtatctgtaaagtgcttacaacagtgcctggtgtgctaagtgctctataaatgattgttcttattatccttgttgctattgccctgtattattgtattattgcattagacaattgcatgtgtaactgagaagatgagacttggtagactcatttctgaagggtcagtgatgaggtcagatgacagagaaatgaagtcagatgtgtatacttcagggacccggactggggaggcacagatgggactaaggagaggactagggcaacaccaaacactttgaccattgtgggtcatggtcatagccaatttgatctgaagcagactgtcaactcagtgtaactgtataatcagcccttagtgggctctgtactctctgaagtaagggaaccagtgaccagtgctgcccactttgacccaggccagcctgatgggctctaccagtgcaacctcattgcccatgcttccttgtgtcactgctataatctttctgccttcttctacaccccactcgtcgagtcctctccattggtgtgtgaaagctgccccttctgattcttgctggggctttggggtaatgagctgttttctctgttacataataaatgcaggtatttattatgtacctgcataattgattgtggtcatttgtggggaggtgaaacatttatgccttggccctgactggtacagagcatggcagctaggttaggtgctttactgattacagtttgaagcactgagaccacaagaaattctattttggttaggaggcaggagccttaaagcaaaagagatctctccttgaattttcatttctgtgtgcttcatagcttgttttcagtgtcagtaaaacgagttttaattatttgtgggcaggagttaggtcaagatcaggaggcacttgactctacttggtcttaacagaatccaggagttcacagtaggctctttccagcccacagccctgtctgaacagccctctgtcatggtgctgtttgtggtcagttgtgtaagaactgaattttaatgccaagctatggtataattttcccccaaagaactggaatatgtgtccccttgataagacagcacctaatttagccactcaaaagctgggaaaataaaatcagaacctcatatgccaaggaggtaaagcccaaaagacgactgcattttggcaccaactattatagaaagcagagttggctaagtcaatctaggccacccctttccctgccagatgcgttttgggtggaggaaaatgtaagctcttcttagctctattattaaaatagcctggataccttgcatttctgtagcattgtacccaaaggctagggtcagaatggccttgtctccagtgcctggtatagcacccagcacgcagtgggctgtaagtatagtgaggactatgttattatgacgcacattctgtagaactggaaaaggcctcagagaccatctagtccaactcctctttttatggatgaggaagctgaggcctagaaaccccaagtgtgttaggctgttttattgtaagaggtcccttccccttccccagcaaaatgaaatacattggttaaagcaaaatggggacttattggaaggattcatgggagatattttatggaacatgaggggcaagaatgagggtcttctcttttgggcaaatggtagatgaaggcagctcgcaccaaattattcccagctccagtgccctacaccacattggtgtctgcctgattctgaggcgaggatatctgggaaggaggattggattggctccacttgggtcaggagaccacccttgctccagtcagctttggccaggatgagggggttatgtgatgggtggggctaagtcttcgtcttcagcctgggggtgatggtggtcctcagaggagagtaggaggatagggaagcacaccgtttatacccagatcacacagcaaagctgggactagattcagttcttctggcctcatcttcatttttcattgacatgacagttaaatgtaaatgatggtacttcacagctgttgggagaatcagtaggaatataagggaggcagatgcctggcactcagtgacgcttggaagatgttagtttctctgcccttccctctgcaagtgtcacctccccttgatcctttctgctctgtactcatttgggatacttggaaggactgtggtcagagcactgtgctgcctagttttagctttgctgatgtggtcaggaaaaatcaacattccacatagggtatggccagaaaagaaacatcccattgccactaaatccaaagtgatggcatggtgctccttgaataatctttccgtagatatccaggatggatggaagaccaggcagggcaacttggctgtcttcggaaaatttctggtttaattggtttttcctcagtgttaaataacagagcctgcttaaaggtccagtgaggactaatggctttacttccattgaacggcttcttcactgcccagttacatacgaaataaaattgtcttcattgttttgaaacatggggagccttcctttatgttgcattaatcattttttatgatgcccatttccttttccttgtaatgtttattcacattaatagcatttacataaaattagatactccttatttccacaaagtacaaatcaaaataagcactcactgctggcccagcagctgctgctgctttaataatagtaatatttttcatagcaaggcaagtgaatacactgcctcccaataaataaactggtgccaagtcagtgctgtcacatcccaaggcttctgcattttgtgtgtaagagtttgaacaaattcagaatctgcgaacattgctgttaagaacctactctatgccgggaactgtgctgattgccctacccatatcgtctcatataatcctcccaacagccctgtggggtgggtgctgtttcttcatttcacagatgatgaactaggtttagaaaggattcaactcaatttatgctctttctactcagactcatcctcaagaaaaaaaatgcagatatgcatgcaatgctaatgaaaaagaacaaacaggaaataggcttctgctgagacatgagatatgtaggttagactcagaagaacttcctgacagtgtattaaataccaaccggatggccatggaagtaggatttttttcttcctgattttgggataattttgtcaatgataggctggtgagctaagttgtgttcttattcatgttcacgtatgtcttcacttttagtagattgtaagtacctcagggacatcccccctcactttttaaccctaggtttttaaacttgttttgtttttaatgtagttagcattcagatatttgagtaaaattatgaagattgtagcaaaactacatttgatttataaatcttgaaggcagacctggtaaaaagttttccaaatacggttaagtctacctctctgggctttatatatatgcctaccaattgcatagagcagttggaaaaacccacagttactaaatttcttgaaggttgtgctgcagatgcttagcagacctgaatgctaaagccagattcctagtctgtccttttggtgtctgcaacctgcagtcctctgttggcctagtaatactagtcacagagttggctgtcactttttgagtaccagctctgtactgagtacttttttgtgatgttgcccaggctagtcttcaactcctgagcttaagtgattggcctgccttggctttcttggcctctcaaaagtggtgggattataggcatgagccacctgtgcccagcctgtactgagtactttacataggctgtttcaaactctcacattaccctgctagtacctgagggaggtgggaatcaaatctgggtttgcctggctccatagcccccacctccccactgccaccctgccttgctttggtattagtgatttagctgcaaagtgcaagtaaacggaagagaatctggttagcatttactttcttggtggaaacaaacacacatacagagacacaaacaagacatgcatctgccagtggaaaaggaaagcatttttccctcctgacttgtttctttcgagttgacggggaggcatttaaatctagataatttacatcatgcatctggggcagccagtcacaatatggtatgaaagggattaatgagagaattggtattttcaaaaagtattgacctctcagatttttctttatggatggtaagtagtgaatcatatgattttatgagcagttggtgccctgagtttactctccagcatttctgcgctctgttataatatattctcatttcgtccacacaacactttgttaggcaacaaagccactattttctcatttgacagatgaggaaacgggctcaaaaagttaaaaataatttctcaaaggtcatttgactgaaaaagcatgatgaggcttgagttcagttctgccaaccagtctcccccttcactttgaaagagacagacctatgctggagatgttttgtcaagtaatttgtaactaaaacaatacctttaggactaaaacatacgggttttattattggataatttcatgatactttgcattattagattctccttcctccccacctcccccataccttttatagtctgttttgcgctagtagctcagtcctccaagtggttttttactttgggcagtttttctttgttgttttttgtttgtttgtttgtttgtttttttaagagacgcaatctcaccctgctgcccaggctggaatgcagtgacataatcatgcttacttactgcaggttctatctcctgggctcaagtgatctcgcttcagcctcccaaaatgttgggattacaggcatgagcaactgtgcccagccagtttgcttgctgttaacttaaatttttgcacatgcaatagcagagcgacatgtaactatcattcagtttcaacaattgtctgcttttggccaatctttttttcatttctgcctccttcccctgattttttgaagcaatatcaggtatttcatttcatccgtaaatacttcagtatgtacttctaaaagataaggacttgaaaaaaataaacctgaaccataatatgttttctcgtctgaaaaaaacacttcctcggtgtcattaaatattcagtcgctgttcaaatttccctggttgtctctttaaaaaaaaatggtttatttaaacggatctgtatgagatctgtatgttgaaattcatggacatatttcaaatttcttttaatctgtggattcctccctctttttttcattgtaattcatttgccaaagaaagtggtggtttatcccgtagtttcccatagtatggatagtgttgactgcaaccctgcactgtcatttaacgtaagctacagtctactcttaacagacttttgttattaataatttcctcttactaaagaataagaagaacctattccctttgtagaaaatgaggacaagtataaaagaagaaaatttaaaagtcatccataagcccactaaccagaggtagccgctactgtcacttcaagtattttgctcagatacatctctgtcctgcttattttcatttaacacatcatgaacatttccacttcattaaaaagtcttcaataatatttaaaaaggcatgtcattgtattaaatgtttccctccctcccttaagttgctcccaattgtgtgttttgtacagttggcttagcagtttcaccaaagggaggacctgttgttcaccttggagcggtgaatatttgtgtatatctgtcatattctgctctagtgttgatagattcctagagttggagttagaggctcaaaggccaggcatattaataaatttcttatatatttgtcatattgccagcttgtttcaccagaatggtggtctttgccttgttccagccctgggcagcctaggaaagtgcttttctccacagagggacagctttgaggtctcgatttaagtttctccaaaagaaaaaactgggctctgaatgtgctgttgcccttgtgtgtgttggtgcattataagttacatcaagcgagtaggagtagtgaagggaaaaaggagtgagtgtgggtgttttcaaactctctgcttagcagactgaaagccagtgtcatctcagtgttagggggtggtgagtagctctgccttatcagcccgtatccgccttagtagtgacttctctatctgccccatacagcctcttgtctgaaattcctgcttaccatggaaataagtttgttaaggcctctctcttgggctcagaaataaataaatagcattcactatgaaaaggggaaatggttaaagaccagacatggccagcttctagcctgcctgttgcctgaccccaggtagtgcctccattcttccttgcctgaacattttaacctcccatgactaagtcacaggacatttctccagctgaaaacctttttggcttagtaagtatctttcacagacccaacctgtactgccccttcgttcacacatggttgtgaattagtttggttgcttcccacttaacacttggcagagaagtagggtgggaagtatcttggagagaggggtagaagttagatgtgcctggaggggtgtagggtggggggcaaccaggttcttggagcaacttgaggggaaggagaagaggaggaggagaaggtgccaaaagcaactttaacttgtttctgagagttggcatcttttttaaaagtcaagttatatttcacattttgtccttgagctgtcctttggctagggaaccccatcactttgtcatgtgagtttgttacgttttgtgtttgtaacagccgcttttgtttttcttaggatggtgctttctcagttccagaagtttcagagaggccctcctcagtgtttggaaattgcttctgggtatattgggcctctgcttccctagggggccaaatagcagctatctggagcatctttccctgtggatttcagcttagaatggacatctgttaagtcaaggtccactcttggtagaatgtgctgggtttcatgctgagtactttacccacggtattttacagaaggcctctgttactggatgttctgaggagaaaatctggaaagtaaacaatattaacttcattttacagatgagaaaactgagggaaggagtgacttgacgaggatgtgcagtcaggggaagctggagtttgtgtctctgaggtctgtggtcttacatgatgagtgccacccttgccaatttgccttcttcatcctcctcaccccctaagacttcttgattgcccttggggtctcaggacattctcttttccacctcaccgtgaatgccctggctcaggaccgacactttcctttccaaagtctgctttcagctaactcttggaaggaaatctctcccatgtttcactcaaaggtataaatgcctgatgaggcattacagcaacttatgctgaagttagttttaggtgttgggcatggagatcctgtcacaccttacagggtagctggctgtctcttcccatctctcggtccagtgaacccttagaaaacaatgccaagagtctcctagtttgactctcgtttcttgctgctcttttacctcttatttgttaataaataattatataaataaatgcttttcctgtttctctttttggtgccaggacttccctaaagcctgttcgtgaaccattggtgactgaaccttggtcacttggtacgtgtccttcactgggctgggcagtcaagttgaagacacggaattatttaatctttgcaccagcctcatcaggtgatgctctggttcccattttatagattgtggaaacagagactacttaagaggtgccaggctgttgacacatattttatcctttgatcctcataacaaatctgtaatgttagtaatattttaattttcaagtaagggtcctgaggcttggcagtcagcagttttctgtcccaggttttactgccgaagggaaagaaccgaggtttatacaaagatctgtctgaccctcaagtctccaagtctctgccattaactgctctgcttgcagttcttacccaagatcccacaactgatgcttggttaagtcaactcaagcgcttagacactgtgggtgcttcatggagcttactgaaaacaaagtgagtcatggataggagtttgacattgtaacacttgagccatacatccatttttgagaacagggtggccttcctggcgccctgcacccatccaggcaagctgtgggtggtaggtgtgtttcactctggagcagtcagttggaagttttgtgtcgactttaccttctgctgtaatgcatcttgtcactagacttagtgacttaatttgatctgtaagcaccctcacagccacgtggtgttactgtatcacatttaatgtcggttaaaaaacactctaaaaaaccacccctccaccactgccccccagcgacaaaacaaaaacaaaaacaaaaacaaaaacaaaaaaaaacctagtattttattcccttgaagactttggaaagattttgtcattcatcgcaatgattggtcagcctcaagaagcatgcaggagccatcataagagtcacaaggtattaagcttcctctttggagcctggtagtgtgctaagttctttatgtaaattttatccttaaaatagctttgcagagtttctccatttcacaggaagtgaatgaatgcttagagaagatcaataaatgcccaaattgcacaactgttatatggtggagctaagtttcaaaccaagtttcttaactgttccatgtcacactgctttcttagacgttatagcctttttaaaaaggagatgtggaatgaacatttttaaattcaaagtttaagtatacacacacattttatgcattgggtacaagagtataaatgccatgaatacttactaatcagatatttaatatctgcttctgccctttctcctagaaaagtgatagtatgaagggagacagagtgatttgttccacacccaacataaattattgcccagggtgagttaatttgtgtttatttctgaagtggcagtggttgcttcctgagggtctaaccttgtttgactgttttgtaggctaaatttctgcaggccttctgcagagccctgtcttcttcctctcagagacaacccaggtgtttttcattccctagaaagttcccctttgccttgtagacacctttttcacacagatgtgtgggatccttggtaaacagtgacttatttggggttatttctccagccagtcctttcagccttttcttcacgtagaacccactgtgccgaaatgttggttttaagcctattgcattattgttttgaggacaggacttatttattcatctgtttatctccaaagcctgcgacccagtagaatgaaccccatttgaatgaacaaatgtacacacacggaagccttgaagaatttaggcaaggtgagcctggctctgtgtatggtggaagtgaggataaggagagtccagaagaagtactgtctgtaggactgaccaagagggaaaggggaggaatttcaggacttgcaggatttcaagggaaatagtgtaatcttagagttttagagccagaaggagccttagaaatcatggaggtcaaccatctcattttccacatcattgagatttctcatcagtcctgagtttacagccactgccaactgaccttcagggcacagaaccagacatacctctttaagttagtgcttttattggttaaaacacttcctgattatagcattgtgttttatgttttaagtaattgatttttttgtgtttgagccctaagatgattttgtcaggaaggaagctatttttaaacatctacaaaccaagcagatagagcactgccttcaagtggaggagacttaccccatgttgaatcttgtgatagctccttctttttgctgacttccgactctacttgctattaatatattcccctccctgaccgcatcgatgtactcaaggatacttgtaaatttgctgattcttaaaattttctctccataaagtcctaaactgtttgttcacctcttccacagcatggtctttaaacaggtgtgaaagtttccagcgtcttaaatttgttcttaccgagaatttttctttacgttattttaccttgagatattggtgaagaaacgatagcccagataagtcaccttgcttgaaactttagagagggtgggtggctactggttaagtgttgagtccaggtgagatgattcgtgtctatggcttttgccatgacaaagaccttttaaagtctctccaatgaagagtcgctgtatctgtatttaagtttccttaggattccttgagcttgagggttcattccccctctctcctcaggtgctgtcttcctgactgctgcacttcttaggtggggaataagctgctcattagtgcccaggtgcttttgttactctgcccccatcttgtgattttgattgtctgcccagcagcccaattctggaccaaccagtgtgcagaaagagcccagcaactgctgctctgggggaaatgcccaggaaacagtcctcagaaggattgtgatccactgaagcaacaaggcagccagagcagcagtaggaagtcagaatttctgctggctctctgtgtggagcattggtgtggcaggggagatgggattgtcctcagcattcagctgaggaaaccaggcccacagatgtcatgtagtttgaaggtgatggaaccggagccactgttagcccagtgtgtacattttccagcacaccccattgcctgctgttaataaaagaaatggaaaaaattccacacagatgcatgactagctagagtcattaaagatactgcagagtgtttgctgggatgactgtgggcagtaaagctattggggagtagtcaggataatgttcttttcttggaaggagagtcctgtctttatttacctgacacgtatcttctgttgttgctggctgttctttgttgaatacttcccctatgcagaatactttaattgtagcagctaatttttattgagtatttgctgtatgtcaggtagttaactacatccactgatgtaaacctcatgaccaccatttaggtaggtactgttaagcctgctgctgccacttaactgtgcagttttgggcaagttactttacttctctgttacttaggcatctgctgccagcatcacctataaatatatacctttttctgaactgtaatatttgtattgtactattgcatgggtctgttgtgagggtgaggtgaacgaatgcatgtaaagcatcacaggctccttaggtcgtcttatcccccagtgcccaaatatgtgatctagggcaagccacttcaccactctgagcctgttcttcctctgtaaaatgagtgtaatatgtatttcaacgattgttgtgaagcaaaaatgaagtaatggattaggcatcttacactccacattggtatgtagtaaatgcacaatagaaatagttgctataattgccatccccatggggaactggctgtcactattttatatgtaggttcgattttaggatcaagggagtttgctaccaagtctggccattgcctcttctctgttctgacttaagagaatgttttggtggatgggtgagatttcaagttgagaggagaggaaagtaaaagacttataaaaatggaaagaaatgcatgaaaacagatgtattacagaaggtctttgagaagttgtggatgaggtttggctagcctttagtacttcaattttcatgggaaggagagaaacctcttccttcacccccatctatacataaccaacttttatttcctgataggattatgtaacaatttttttctgttaattatcatggacatgttaggatttgattatttggagaggactagcatgcttaattagcgttcagaatttacagtttataacagggctctctttgcagtgtactcatttttgttacactggagacttctaaaaaagcaaaaagttgccttgattatcaatgaggaatcaaatgcaggtggttggtggtacaggaaatcaacccaattactgattaatatgagtgatagagtgattttcctatgatcttatttgaagcatgcaccactcaattggagttaagatgatagttacaagtaagcagatcctaaatcaaacttaaatgtaatttaacatggaaaacatgaacatcttttaaaatatttttgaattaatctcacccttttaccaacctgtggcattattttcttgctgttgatgcccaagcctttccttatttcctcatacaaactctgatgtgagtcctgactgggttagctatttgtgattgtccctattgtaaagatatgtaaagtatggtctggggttccctgtgggaagtcccaggatccttccaggggttctgagagatcaaaactatttttatactaaggtcaagacattttttgcccttttctctcttattctttcataaatttatagtttatgagactggagctgtttgggagaagtagtttcttgaaatgttctctggtggtttcattgggagtttagtatctttttagcttttctgctaggtctgacatctatctggcttaccgtcttttagagacaatgcaaataggtacttttttgtcactgttcggtgacttatgtcaaaatgaagactgtcaaaaagtatttttccccctggttggctttaccatgctcctctcagattgtaagagtatggcatcttttctgaatctctttgatgcatcacatgatagatgccgacaccattcatcctgccttagtctttatttcttttacccatgtaaagtgcctaataccaaaactggtacatagtagacattcatcacatattagttcctttggtttattgccttgtctttatccagcttgctttgaatgtgtttctcaaacttcaatgtgcatacaaatcacctggagagcttattatgtgctgattctaatttggtaggtttggggtaggacccaataatctgcatttcttttcaattctcaggtgatgccactgctgctggttcactgaccacactaggaatagcaaggatgattgatgtatatataaccttaaacatgctcccgcacacatgcccttttgtaactttgccttcttctcccccactgtgattattaagttcgaagcaggaatcattgccttgagttgattgatcactgaatttattcagcaaacatttatcttgggtgatatgattgttttcacagggctgtttctgaaactttgttttgcattatcttaatcccaggtgtctatctctggtaggctgatgagacagagtttggagttgagtagtcttcattgcatgcagcctggtcttattctggggctctcttttcctgtctcacttggaaatttcatttcccagtaatcatacttcataaccattaagttgcttggagttcacacttttttcttttagtgtcctgaaacttatttttgactgactcagaagtactataagagaaataagtttccatatcatttttattaacctcttgtttagattcaagcctacagagtagctactcctgttgtgttcacaggattttctcctgagctacattttcttaacctcagactatctctccctgaccaaagagcccagtagtccttagtggggtggtgtgggagacacagcctcagcagggctgctgtactcttgatcaactgttgaaagggaaagtcaggcccagaatctgcctcccaactctttttttccatctctttttccactagggtggttgtatgctctttaggcactgttgatttctggctttgaatcatgatctcttcatatttcagtatgcatgaataataggacaatttcatgcattcattttgctatttctgagtagaagttagtgtgaccaaccaagttttaatctgatggacctgcatctgaatcctggctatgttgctcactatttgtcagtttactacacctctctgtgggtcagtttctccaagccttggtttctcctctgtaaaataggggtcataaagtgaccttattgaatgacagtgaggattacatgaagcaatctatttaaatgcttggctgagggtctgttgcatgatcggcatccaattaatggtcatcctcatggtgataaagatgatcagtgtcatcaaatgaaaatgaaagggaatacagcctgagataatagtctggggaagtaagtgcttgtggtagggaaggaagtaataggcaaaaagtatgctttagctctctggatcccagtctgaactctgaagggaggagagaataaatcagtgatcgttaatccgtctcatacccagtgacagagcagtgtggccagagagaatttggggaagaagaacaggaagcacaggaaggcaatgaagacaaggagggatgcttgatattctgaaaggagggttggaggtctgatatgtatttggataatctaaagggagggtttatttatgacaaaggtactttgttagtgggatgatgatttttagtcacattgctgttttgtattattaaatggagagctgttggtatttgagagagatgcccagtttttccagagtctgaaaagagatttttgttgatgttgtagtataaaaagtactctgtgacatggcacatggctgccaaaagtgtgaaagaaacaggaaatcactacacacttgaaatataatagaccttttcattcatcttgtgtttttttccctctgaattgttaaataaaagtatattctgttacatgctacagctagaagcaagctttaagctatcagaatggttgtgaagaactgtagaataatatgaagataactgtatttgtttcatggcataaagttcttttcaaatttggttactcatcctgtggtttaaaagttaaaaagagaccatatatattgtctctgaactctagctgaatctatgtgaaacacaagtagaacttttgggaggctgtgaggtttgtagaagactttaatagaaatgaatgaagagctggcattttgtaataatatttcatcatgtgcttttctttttccgttacccaaggaacatatttgatgtgcttgatatttttgttgttgttgttacctgaaaatcaaagagtacctctttatatgtgtgcctcagcaactttttgtggtttataggataatgtccactctccttaacagctgcacctagagtcctctgccttctgctgctgccagaaggagcagaagcaaactggaagcctcttgcattttcacgtctccttgcctcctcctgtaccagatgaacacctactcatctttctggactgagctcagatgtcaccttctgaagagacccttcctaactactgcttttccctgttccccagtccccattagaagttggcagcccagtccttgcagctccagctgctctgtgcacactgtggcccaacacccatgaggcttcacggggttccctgatggctgtgagtctcttctgtaatctcagcttctgggggataggcatggtgttccattctgcatgctgcttgtcacataataggccctccagaaatactactgaatgaataaatgcatctaatagtctgataattttatctgtatgattggcgaaaatattaatcttctggtgttgtgacttgtatatgaacctttctgtttcatgatggcaatatgccctgccatactttaaaaaaattgttacagccatgccgtttgttttttgttttgttttgttttgtttttgagacggagtttcactctggttggccaggctggagtgcaatggcacgatcttggctcaccacaacctccgcctcctaggttcaagctactctccagcctcagcctcccaagtagctgggattacaggcatgtgccagcatgcctggctaatttttttatatttttagtagagacagggtttcaccatgttggtcaggctggtcccgaactcctgacctcaggtgatccatccacctcggcctcccaaagtgctgggatgacaggcgtgagccaccgcgcccagccagccatgcctttttactatagaaataaagatgaaaaatctcaagtaatcccatcaactaaagatgattagagttaaaacatgttggtttataattctttataaaatagccttttaaatccaactgatttggactagggttgggggtgcttaggaaataaggagtagataataaggtagtatggagtagatatataattgtaattcccccttgagttttgagagctacttacccaaaatagagcatgacacggtttcgcctccaaacagaatttccatatgaaagattgaaccgctttgtgcttgaatcactgtgaatgttgctgctgctagttctttctgtaatgtgaatagaatttccttagataagttgtcagtgtattattttccctttaaaaaaaaaaacttcttttttagctgttatagatttcttagatttttatatagaaatattttctaaaattttttttacaaaaataaaatgaaaattgtgcctgttgtgctgcatgtgctttcaagttagaatcagtcattgacatattaatggcttcttccaggttggaaaattaataaagattatccttttacttgaagaaagtgataagagaagtagaaagaaaatcaggctgagattaactaaggaagcagcctttttattctactttcagccattcagaagagggaaaaaatccagagtttctaataagaaaacgaaaagttgttttgcattctggaatatttccaaaagcattgctattgatgttgaattccactttggggttggagattaggaaatttttggaagtgttgaagtaaaattagatgttctttgtattattttttatttgacagtgtacaaataatgaaactgtaaactaaagtacaatgacataatcacagaaatgatcataaaaatggttatttaacttgaagtgggattgaatattcaaaaagtgcaggtggtgtggatgggcttctgggtgaaattaggttttctctttcagcaggaaaaaagacagagttttcattatactccctgccattggtgatatggtgtagacctgtaatgataacaagcactcaacatcttcattgaaaagcaccagaaagatgcagagcagaagctgtaaacttcacaagtgccatcaaatcagactgtttcttcaaagttgaatggaaaatttcagatgttggtcatgaaatgtttactctgtgacccaaaaccaagttaacaggcctccaagagaggtgcttgctcttggatttgaaatagtagccatagtgataacttctcttctctgtgtaagccctgtaattttgtgtattccatcattctctctggatttagtggttctgagaaagcaaacctagaccttgggccgagacttcacacagaaatatttggggatctgctctatggttctctgggtttgggcctcagtttccccatttttcagcttttgtggattctgatcattctccccacttgatgtgcattgtgtgtttgcatgtgtgtgtgtatgtgtttctagatatgtctgtgaattttggggtgtattttttaaatgctttgcttgtatttttaatgttgctaataaaatactagctacatgattttgagggcttggcacctcttgactaggtaacagtactgtgctaaactctttacatgtttatctaatacttttctcatgataacctgatgtgggtggacgtcctatttttttacaaatgagaaaaggctctaaaattaagtaacttcctccactataataaggaaggcaggaagtaaggctggatttcatgcctgccagattccatagtctgtggactaagcaactgtgtgacttgctttacttaacattctgggcccgttttcttcagctgatgcccagggaagtgaagtaaactgaccaagttgacacagttagtaaggaatgctcagagccagtgttcctttctctctccagactgcttccatggaattcttgctctgggcttggcagttccatcatggttcagaaggatggatctaagagcaagatgacattgtgatgtcaactaaccttccagagaatggtctaaggggtaatagggccctactcgctctttccactcgaaatagccatgccccctttccttaactttggagcccacaacacttaagattagctgacatttaatatgtgtgcctgctaggttccaggctctttttatatcctatctattctttatgtccatctgcttgggaagtaatcttattccctttttgcagctgggggaactgagcattggaaaggctggtctggccaatggacagctaaggtctttctgatgccaaagcccatttttggtacaccatatcatctgctactgagaaaaaaaggctagaagtggaaggaggtttgtttgtactttcaggagcatcccagagaatcgtagaattgggttcagtatattcttcatggcttcacctaaaattttcagctcggggcatttttataggtttaagaatgattatatgtaaaaacaggcaaaatttccagaaggcaacaaaagataaatgatagaaccctgtcttctgtccctttccccatagagatacctacacacatttaaactgggaaaggaaacaatgatccatcgtaaagcttacccgtaagacaaattgcctttggcaatataaaccttaaatgctcatgaaggcctcacatgagttaagtacagtttaacatgattctgccatttgagcacctactatgtgcctggtttttggtagatgactgagggaagggtaacagaatgaattagacatgctttctgtcccaaaggtgttcacaggtgaatggggtggtggttgtggggtgccaggttagctgcaatatagcatagaccggtcagagctgtgataattcagattgctctgagagcacacatgaggtcatgacaggttccaactggagaaatcttacagggtcctttcggacctggacctgaggaatagatgggtagaacatttcaggcagaggacaccttttgagcaaagacccagggtgagaaaatgcaaagtggaatggagactcccattagatgggtagtacggtttcatgcttactcagtttggtttgatgaagcaatctctctctctgtctttgtgggtttgtgtacagtacatgtgtgtctttctctgttaaatgccttttatgttttgttggggacgtgtgtgggagtgattcatttccagctgggtccagctgtaatgaaaatgtcctgtttgacaaattgaggaattagattacaactgtctctccctgaaagctgtgacactagctgtaacatcaaacatccctccctttgtggggcaggacaggagggaaatggtgattcagggctgctggatgtgttgactagaaaattatttgagtaaataagactgtgttgctccagttaattgataaacatggcttctcactgagccatgtggttttcctccaaggagaacttagaatggtgccatctgaggctgccctagtagagaagtgcaacacgtcataagtggtcaaaacatttttattggaagtaatgcatctgtgtgattttctgtttagtccctatttcagagctctttgttttttcttaaaatgtaaaatactctcaactttagcttgagaatacctgaagtgtttagttggacatttattatgagccagtaacatatttgcacaggagctctggaggagagcagtatcacttgtggaactctgagcgagttgtatagccacccacccatgccactttctacgtctgtaggactatagatttggaccagctgacctccaagatcctcttaatagctcttgggaaatggaatgaataaatccaagatcctggatctttgctctaccctttggcaatacttaggatgtagcaactgtgcaagttctcacagtcttaaatgaaaagagccaagccaaagctgaagctttgttgtatcttcatcaagggaggttcccacccaatgtctgttccacaactggatgccatgttttgagaggagcaacagagaccaggatggaaacagaactggaaaacttatttagttaagtggcttagtgaaccgctgtgtcactcagagatgaggcagcagcagtggttgagggttaaggctggattttgaacagttggagggctctcataccctaagtgttaaatccagtgtgaggaagagccacccaccatctggtcaggagtaaaatgaagtgcctctggggaacaaaggcttcagtggaaccattccagcagatatcatattctgaccattagaaatttgattaagggaagtgttaccctatatttcctgctagtctaagaggtctgacttttaacaaccataaaaatctatacagacccatgtctgtaatcccaacactttgggaggctgaggtaggaggcttgcttgaggccagaagtttgagaccaacctgagcgacatagggagaccaccatctctacaaaaaataaaaaaataaaaattaattgagcatggtggcatgtgcctgtactcctagctactcgggaggctgtgaggtgggaggattgcttgagcccaggagttcaaggctgcagtgagctatgatcacaccactgtactccagtgcactccaacctgtgtgacagaggagaccttgtctcttaaaaaaaaaaaaaaaagaactactgagccataactaattaattgggtttttacagctttttgtcttaaaactgcccacatctctcatgaaaataatatggtgcagtattgtgtggccaaggtgttgtgtttgtgtggagggcctaccacagggggcagatgatcagaacttacttctactcagcaaaatttaattactttatttttcctccctcatcctgaaattaatacaggtttattgtaacaaaagtagtataaaggttgtcacctgcactttcactgcttttaagactattgactactgtattatttgtcacagtggttaagagcatagtctttggtctcttggccctggttttgaaactctgttgtggcactacatactaattatgtgaacttgctcaagcctttttttttgtccaccagtcgtggtcatttcctcatttagtaccagtttcacagaattgttatgatgataggcgagaaatgcatgtagaatacttacgacactggccaccagagttcaagtgctcagtaaatgttagacagctgcagtagtggtgctagaagtagaagataataaaactcagtgtgtatatatatatttttcttttgcaaaagtgggatcctgttaaatcacctgtcttaaaaactgccatttccttttatattgagcatttctccatgtcattagtctaccaaaccatcatttaaaaaatagctttattggtgcttaattcacgtagcatacttcatccatttgaagtatacaatgcagtgttttttaactatattcagagttgcacagtcaattttagaacatttttatcatgcaaaaggaagtcctgtaactgtcagagtcactcctcattttcctccaaatcctttactaagctactttctgtttctgtggatttgcttattctggacatttccaagccatgctttttaatggctgcacaatattctgttatgtggatataccttactttagcagctattccactgctgttggaaatttaatttattttcatgattataggaaatatttatattaatcttctttacccgtctcagtagagtcacctgagagtcttaatgaagattcttccatgttacttaattaagaagtaacataaaatcttcacctgtggtcttacatgcctgtgctgtgagatgttcctgaagagcttcaggctcctagagctgctatcacaccataacaaggtccctaacactggagccaagctttggtaacaccctacactgaggtccagttggagctgttcagggaataacagcagcagcttgcccaacaattttggtacaacagtttggtgggagaggatgagtgacttatttgagcggagccattggaagacagacagggccatagtatcaccagctgttcacatagtgccacaacactcaaatccaaggacaactcttagaggaactggagtgcagggagaattattcattacatctgctcagaaagatagagtgccctaccaacacctttgcaaattgaaattcccttgctcttggcatgtgatcatcctgccaactctgtgaaagctcccttagctactcagatgctgcctcctgggggcattcatccagttattcatatctaaatcatggtgctctgatgtggactgacctggggaggggaaggaataaccacagtgggtctggtgtgccagaatctgaaaggctaaattaagatgacttgcgaaataaagggatcctgaagaaataggccactgattgtctctgaatatattctataaggtcattttcagttctcagggctgggaaacacaatgtggagagaagcattaaattaatgctttgcttttaaatgttgggattctcatagaagaatccatttctgctcatttgctgtctggctgtcttaatgcattcaaagtgtagaacccttgaacatttacatttatttgttgttgctggtgttttctctactctttgttggcctccggatggacaccctgttaatattctttgactagcgtggagcgagctgtttaagcttttttcaggggaaataaaaatgaaagttgttgcaacaggagttcagcagtgttgcaccaactaccattccagcacatccagtctgttcgtggtgtgtattgaaacctgtattttatttggggtggaaattgcttgaggcatttcaacttgtttgtgcttaaattggggatcctattgcagcactgatgttttataaaagttgtaggaaagtgtggcccttacattgcaggcaggtgaattcacaggctttgcaagtcggtgcatgagtactgtaatcatgatagtagacttgtaaaagcaaactcctgttcttttgtacgtgagcatgctgggacttctctcatttgtcggtctccagcagtaaggatatgcgctgggaagtcggcagtgaggcactgcattgagagtgaggcatatcacatgccacctcctccttaaagccttctctgatttccagcaaccctctactacttagaactatagacggtggttaaggacacatgctgtggagtcaaaaagacctaggttcctaagccagctccgccatggcagtttacttaaattttctccattttctcatttgtgaattggggataatgatagtacttaaaacatcattgtgaagacaatagaaaatttcatgtaaggtgcataacttaccaccgtttctggcatatttagtactccctaaagcttgtgattactgttactaatcatatgttttgtggtctcttctcggagccttggttttgtcatccacaatataagaacaaaaacatctatctcaacagcagtttataagaagtaggagagacagtgctggaaaagcatttagccctgccctaacttagtcacttggcatttcagcatgtggtaattaatacagttataacacttcattctgttctatgtatggtaactagttgtttacgtattagtgtctcactaaactgtaaatagaggctatgctttcctctttgtatatcccaaaacgccttcctcagcacaatagctgatcttcaactagtcattcagacaggtgtgtttgaacttttagatcacatagtttaagaacagatgtctcttactttgcttatagagtgaacaaaatatgataagtgctacagatgtctttttcttaacaaggatacttgtggtgtggttaccaaattcacacgaggcaagcatagtgtagcactggtcttttctcactgtgcactgtttgaagttggcctcagtgctagaaatctgtattacctgagcaaatgtttaggaattctctttgcttttgaatacgttgaaagaaaggaattctttctccaatttgttcagctctcctcctagttaaaaagaaactaccatatttgaccccaagaaagagttaaatgtgaactcatctgagttttcagaaaaggaaaggttgaaagctcacacattaattattactgctgctattctcttccgccccccagaatttgtcagtggaattttggtccctaaatgtataggcatgtttgggttagggtaggacataccccacctctggaagggcctgcaagcagggctgccggtgagcagccagtgttctgggttttgggggttccttgttctcagtcacctttgcttggcttttgcagagctcggggttacgaggcagactgtctagagcctctcctgcttcttgcaccagatgctcatgcactgtgccactagctgaggatgcaagggtgtgcttttgcttttcaaaagaggtgctgtaaaaaatgagtgcatggttaagatgtgggccatgtgaatgttcattacaagaaccttaactgtctgggtaaaacagatgaagttgtaagtaccactgaaatttcccagccctattcttgtatccatagacttggaggcctcatattttaatggattttacgaattatgcttcctaaattgttgcatagttatattaggatataattaattcccttgaacacatctgagtcatccattgcatgtattgtcagttcttggttatttgatgtcctttttctaagtacttgcccaagtcagtttgcctcactgtgccttaatttccttttctgtagagcaaaggggtcagacttagatcatctttaaaccttttaaaaaattacttctttgcaagtggatacagctctccagttggttaatgatattcaaccttttcatccctacctgcttccaagacagccttagacagtttcggccatactcccagacctgctgtttccttacccatgatgtttaccttctcatttcattttgttaaaagagaagtgagcctaacatttctggaagctcagtaaaggttaacagccaaccagccagagaagtggggttgagtcatgatgcttctggcaggaccagggaggccctgccagaaccgtccagatcttcctgattagaaactcacaggccctttacagaaagttggcttctactgatttgatgattgactcagagggtttgggttagttggtttctaacagagctggcagggaaggagaggggtggcccaatacattttgagcccctggaggaatagggtgataactgagggagtagtattgttaggaagccctggcagctctgggagccatggggcaagaaaggacaattgctcctgcatctgcatctttttgtttctgggtatttatttacagataagtggttttttttaatgcctggtaatctattaggcagtaggataaaaagatgccctcaaggatgtctctcaaggctagaggggagatgcttattgtttatcaaagatctgctgagtgcctagcattgtgttatgggccttacatacatagtatgcctaattttaatatagtatgataaattctttgcaagtgatgtctgcaaaggactatgggaccatagaggagtggaggctgcattctggctggaaatgggaattagggggaacagacagtagagggaggtaggaggagtcaaaacggtttttcacatgagatagaactttcagctcttctgcagatggcactggaaatgtggtcactttcttatccaacatgacaggggactggcaggtggaaatctgtgccttgaaattacttatatttgtctgatagagctaggtcagtttaatgctgcctttcccttgtctgatagtgttggttacagttttaaaggcttatttgttcttttcagaaaagtggctaaagaaagtatgttccctcttgtttctttacactagtgtttaaaaacatcaagagtttctgtccctccttctcacatccctaaatgagtgtccagtccgtaatgttcaggcttgaatagaacggcatagcagtccatttgcctcagcattaggaatcttgtcctccccaggaacatggtgatgatccagaacggagtcttaatactaccatgccatcaacaggagcagttgcttttgtttaggaacaacagtttccttccatttctgtgcagtagttgtctgtaatgactggagcactgtcttcactccagcagatgcacgataatttcattgcattgcctattctgatctttttctcatccagtttgattccacaaatgcctagtgcttcacaaagcctggatagaactggtcctatgggtgttttgttagaaagttccatccgacacatggacttccttctcctcaaagccttctgcgtctccctggcctggaaatgatcttttcccactgctctccattgcaggtctttgtatatctctctttgctcttaccacattctgccctttgttagttatacgtatgtgcatcctgtctctcctaccaggttgtaaactcacttaggtaaggactgtgttctatacatgcttcacaatccctagcatgaggatttgccataataagcactaaatgaatatttgttgaatcgaactgaatccagatagcattatattgaactgagtcctcatcattaagtacaaaggaattgttagaaggtcagtaatgtttacttcccctatctgattcctagtccccagttctgtatttaattacttaagatatatgtgccatctgcagcctgaaggatttggcagccagtgattcaaatacaaggtaaaatgaggcagtttgggataagatcaatgtaatacctctctgtaggagacagcggggactcaagacacctgatttcagcagattgcagtaactccataatttatttgcatctaagagaaggaatcatgtttagttacagcattttcatttttttttttttttaaccacagatggcataaaattcatctccagagagacttctaactaaacctgagtatgaatttttatctctcagtttcttatgcaatttttcactgcatacctacatagccttcttttggaagttgttttattgacttttaaattttgcttttgtgtgttttacttgctgcttctcttgtcttctccccagctgatttttcttaacaaaaaatctctagagatgaagaaccgtggcagcacagtagcatcttcattacatttatgatttgcattcccagctcagcactttgcaatgcatattttgcaaagcaagtttaatttgctagaagtcagattgagatttagcatctatctttttaccatctgttatatgccaggtataatgctggacacttgcacacttatttcattttatcatagaaaattaaaagagaaaattatatgattattaagagccttgaatctcatactaggggaagtagtcctctgggttttatgtgatggtgggatgagataactgatgttaaaagacaaacgtggtatctttctggcatattagttttactcagagattttgagtgggaggagtggaagaacttagacaatttaagtgactagtaatcattttatatttaagcaaccatggaaatacaaaggagtgcaaactatgcacaagtgttggtgataaaacagagtctttattaggtttatgtagttagagtagtgagtgctttaggatgcaccccctgacttctaagggatactttgtggaaaagctggagatttccatctagtaagtacatctctctccttttttgtaaatgtagaaattgaggtcccagagttcacattcctattgactgaggagggattttaactcccaactcactgattgaccctcacatgcctgcttcttcttgccctttggaatctttggtgctgaaccagaccctcatgtgtaagcccacatggtcaaatggagccgaatttgaaatcagttgtacttgcagaggtggcagagtaccataaatgaggctatagagtgggttgtaaatgccaggcctgcttctttgcagtcacctgtctctgtagccactggggcttattcactataatccatgtttttttgggggcaggagattgacagccttttggaagatttaattagctgctcttccaggaaagatagcttaatatgccaaagattaaacttattgtgtcttggaatcacaaaatttcaaaattgaaaggatccttaggtttcctcagccagcattcttgatttatatatttgggatgagataaaaaggttttctcaaatttctggttgtctctatttgaagttagataggtggctagcccgttagttgtttacttgttttattgttcctgatgtctttaaccgaagactgggcatgttgcactctttggcaaagtaaactagggcaatggtgttgatgtctactgatctgatcagtggtttgggatagataattttactcttttccattggtaaattctactttcagagtagcctgttagaaaggatgaaaagctctgaattttctccatttttttttaatgtgatactagagaggaatgatacttcttcctggttgtgtggaaagctacatctaggttggttataattttcatttttaactcttcctccttcatacagccctagacttctcagtgtttaaatctaggtgtcaggcctcattcatatgtatgtatgtattctttttcttttttttttagacaagatctgactctgtcacctaggctggagtgtagtggtgctcgctgcaacctccacctcccgggctcaagccatcctctcacctcagcctaccaagtagctgggactacagacaagtaccaccacaccagctaatttttgtattttttatagagatggggttttgtcatgtcgctcaggctggtctcaaacccgtgagctcaggcaatcctcccacctcggcctcccaaagtgctgggattacaggcgacagccactgttcctggccctctgtatttcttatgatcttaaatcctggaggcacatgacatatatgctcattgatattccattttggcagtgaatttgataggcatgataaatttggttttgcattaaaatatagtgacttttctgattatgaaagtaatttcccttttttattttattttttaaagaacattgtaagtaatttctcattataaaaatgtggaaaatacagaaaagtacaaagaagattgtgtgctaattttgtgaatactaatagcattaactagacaggaatatgttaaaatgtacttttctatgcattatatagtaatagtgaagactttatatagaacatgtaaataattgtatgaagtagttagtgtacaaaataatgtcatatatgcagctgcattttctgcctttttcacctagaaagtttttttgtcatgtcattaaaaacttttgccctctgttttcatgactacataatattctgttgtgtgggtgtacctgtcttactgcttcacctactttattcatattcctgttactgatgttggtttttccatccctccgctattttaatacgtgcgttgctctgttcatctttttgatgattcccaggaagggatctcagtaagtagagttgctgggtctagggcttttgaacattgcccagttcctcccagaatgcttccaccagtggatgccagtgtgtcccatcttcacggataaggtaggctctgactccccattcacaggatttgtaaatacttgctctgttctgtgccactcagtgttcccatagccctgcaagaagggtaccacactacctcattcagggcctggagcaatccccaccaccccttgaactggctgctttctccccatttggtttttagtcttcattcactaatacgacagtctgtcagggaagtgccaggaatttttctcaacatacttttattcctttttttattttattttattttttaaagaacagaaatggctctcttaaaattagtagcagctgggggctggttctggctatgtgatccaatgcaacagtaacataaatgagggtgccattctatttctagctgcagaagcttccttgccatcttagtgttcttcaccaaggtgctcaactagctcccttgcaatttcttctccaaataaccacagtaattgctacagaggaagtgaaaattgtaaaaacgcttcagaagactgacagtggtgctgattataggagtgactgcttttaagttctaataaattgttttaattttcttataatttctactcagataaagcagactcctagcttttaattctgcttctaatgggttttttcccttcccacttctcctgtagtagggcagtgttgcagtgatgagaccatcagctgaaggccccattgctttgtcctgctgatctttttttccattggccactccatttgacatttccactgacaatgtcttatttctgagatgaggggaaacgcttttttaagtgtctagtctatatttgaagttagatgaacatggactgaaccccaactctatcacgtagtagttttaaggccttgggaaagggacctaactgtaaaaggaggtgataataccacttcactggctatgagggggattaaccaggatggcctgttaaaaatgcagagagctggcagagtgaacagtaaatgttttaattcgctgtgtcatttgcccttagctaggctgtttcacctgccgactcattgtgttgctatgaaaatgaaaggagatgttcgtgaaaatgtctggtatggtatctggcacatagtagtgcttgccaatagtagttctcctccttgtagctctgtctaactccatggcacagctaatgcacctcatcataaaaacactgggctgggtatggtggctaatgcctgtaatcccaacactttgggaggccaaggcaggaggatcacttgaagccaggaatttgaaaccagcctgggcaacatagtgaaaccctgtctctacaaaagaataaaaaatgagctgggtatggtggtatgtgcctgtaaccccagccacttggggggctgaggtgggaggattacttgagcctgggcggtcaaggctacaatgagctgtgactgcatcactatgttacagtgagaccctctctcaggaaagaataaaaataaaaaacaacatctggtccatggattccatcaaacaagtgctattcctttttgtcttgtcataaaaactctctatcagtggatgctttctgcacgtccatttgctaatagtttcctgttccttgttttagctattttggtaaaagtgactaatggtgcagcaaccatttcttcaccagcccttcctcagctctcctctccactccctcctcctcaggattatagggtccttcttgctgctgtatcaggtctcagctcattagttgtttgaggaaagggcctgccatgccatgttcatcacttcagccacaaaggatggcttttactcagcaatcatgtgctgaacatctgctacattccactcttagcactagtgaaacaaacgcgtagcaacagagccccaggcctcaaagctcacaatggaggtaactggtttccaggttaagtgcactaaactgtgtggaaggtgttatgatagtacctctacaggttctgatggaagcatcagtgatggatttggcttttccatttgggagaggaggctataaaaaaccttcctggaggacgtgggctcattctgattcacagacaggtccagccccttcacttcttactttgaactactccatctggaatcatagaaactcattagcagctaagtgagtcgtagaccctgttcctacagtttcaacaaaccctgatggtggcatttcagtttatcgtagaggtttcttttcccctacaagggtcattctctcttgcccaattttggctgagaagggaggaatatcatggccgttttggctgtatggtgttactgtataatgatatggggattggtgagtgaaaaataaaatgaaccctcacttgcttaggtaccagttttatgtaagaagaaactcacagcttttgcacattatttgagatttgcttcttctgtttaacatatttgtggtactttcctaaaaagttttgttatagacagctgtagagattaaaaaaaaaaaaaaagcatgatgtgaaactaaaagcaaaataggaatgagtctcaaggtgtataatgtaccaaatgatagtagggcctggaacattcaacagcatagcctgtactgacataaggttaagaaacattggccttcaagtcactttagactcttcttaatgagttgtcgtgttggagagcctgcaccgcattttgttatttgccattagttgatctttggccagtattaattatttacattgagctgcatattacagggggaaaatcccaaataaacagaagcttaaatgcgatagtttatttctctctcctctaaaaggaacttagacataggcctggaatgccaggtttgtggcgtcctttgggattcaggcctccttccttttgatctcaccttcctcagcacatgacttccatcctcaaggtcacctctcagcttaagattgctgccagagctccagctgtcatttctgagatggagaatctaaaatggaagggcaaaattgggctttcccagctgagccacttcttttccagaacccatataaataacactagtatttattgaccacatttgactgtaagagaggctaggaaatggaaacttgtattttcaaaatattctggtaaaaaccaggattctagtactaaggagatggggagaatggatgttggggcagcacatcagcagtgtctgtcacaaggccacatcaggaatacttggagtagaaaagagataaagcttagtgaagtgaggaggtggagaagttgatgtttaccaatatggataccaaaactgctgagagtgatgttgcagtagaaagaattgtgattagatggaaaagttattgaagtattagtgtcctggagctcagtagagaaagatggttggcatagccctcagaagaggagactggtatgaagatggcataatagtggtcacaggtgaacttgtggatgggaacagacagtagaaaagggacagcattctttgagaataggtcttgaggaaagggaataccttttaagctgaaaagacggaagtgcttttctctcctagccatggaatagatgatgagttggtcctctgcagagaagggacccgaagggcacaggcgaagggagtggccaatgccagtgggaagatgagccatgaaaccaggtagagggagtagataagtgggatttatatctaggcctaggctagtagctgtattaccaagaaaaaaggaagctagcacttggaagttagggagaatgggaatgatggatgggcagaagtgttgtgaattggtttgggtgctcagtgttgctttttttcttttgcattttccaatttcctctgtacgccatacactgtaatagtcattccatttaaaattgcagctgggtagaccagatattgctagggggcatatctgtcattgaacttgggaagcaggggaccctgctaatggaggcactccagacacctcatgggagcacagctgggaagcaacaagtggtctatttcttggctcagcctaattcagactcgcctcttctccttagagaaaggaagaggagcctcttccttatgctctgctcaatgtgtagggtttttcttcctatttgttgcaattctgaacattattagtggatagtcctggttttgagacttacccctgccttagaccccctgttcctagctcttatttcctgggacccagtttcatttttctctttctggatctcaactctcatccctgacagggcatgatcattatgttatatgatctctcttggttatatacaaagaatgtaccagtttgtggagtattcatagactttttttggttttgtttcttcttctttttgtaaatcctagaatgatcccctcccatgccaccaccatgatttgggactgcctactattttccttgtgaactctccctgcccaattgatatgtagtattttttgcttgtttttactttttgatatgtattattatttctgttgctgtagtgttttgtggtttaatagaggctcttgtcacattttctccactaattgtcatagtaaaattgtgacgggagcagacagtagttgttacttatttacaaatcggtaaccgaaattcagaaaggtcacccagctaacttgtggaagacctggggttggaacccactttttctctctctctcttaaagttcagaagttcagagtaagcaaatgaatgttaattattggcctgaacaagatctaattaaagtggtcagtctgctgtggctgaagtagttgtctgcacatcccgaccacatctaaaccagtcttggattgtttaatgtttagtatctgtggcttagctccctttcgtttgcaccagttagagcatgtagatgccacagcagttccatcctgaccctgtgaagcacgtttttgcaggtccccaccttgcaggtgccactgggaagcgcagcatgctgtggtttggaaagcctgcccaggcattggtactgaacaggcctggcaatctgtgtttcctagtgtgggtattaactctgttatccttgatacagcacttagtatttctgggccttcaactcctcattgtgaaattggggtagaaacaggtagtttttggacaatttgttacctctgcaaacctcagttccctctcatctgtaacatgggcatgatgatacccactttgtaatgtttcaagattaaataaactgctgtataaaaggagctcagtgccatgcctagcaatacagctggtgcttaacaaatgttccacccttttcttcctcctcctcatcatttcaatatgttttgagagcatcataaaaagtggtatgaaggttaaaaaataaagtcagggatgtcacagtatgaaagttgttgcccctccagtagaattaatatgtggggtgtaagtggggggaggaagcttacctttttgaccccaagtgagagccttgcatgattgttttcttaaaaatggccttttctgaccaaattgaaggtgacgcattctagactttcatttataatgtccatttacatgcagtacttctatattcagattgacttcctgtcacactgagtgattggtgggctgcttgccagcctaggggtggactgcagcaaattgtgtgtgagggaagccagcagtctgcagggctgagctgaagtggggagaggagaagagcatgggacgtggtgtcgagtgcagtggcattgactgcagacaggctgctgctttacactgggggattcattccctttcccccagtaaagactgttaaaatatcagaactgatagtataaagtcatgagttttttagttcatgcagaatgtggatcatgtctgagataaaaattcataagatttttgaatatcctggggctgatggttttaggcagtgaagttaatttaattttattttttattttctgtagctgaaacgtctgcttttctgtgaggacgttgattatgtgttccactgccaaaagaagtttctcattttcaaactgcagctcccctagttgggcaatataactgtaatttgagaatcccacaagggtagtctgttactcggcagataaccctacagtaaatttgcatgaaggcattatttaaaacagttttcttctctgacctattattgcacagcaaaatagcagtttcctttctaaggtaagagatttggaaggaggactcaatttatacgtgatctcattgagagtgagagctgcaaagatgaggaaaagaagtggaccttttaaaagttttttttttttttaaacggttatgttattttattttgttgaaggcagaggatatgttttattttagggacccaccagaattgcttagaaattatctgcaggctttagggatttttgcttatcagtatatttcatttgccccattgttcagcccatccaccacctccttccatttgttctcagaaactaaactaggagaacataagcacttggttatgtgaaaatgtacttatgattcttccatgaaaacctaaagtattaaaaacccaacagttcacttgtgttctttcatgaacaggtatgtgcatgctatgattgctttcatttgccaagtcattttttaatttaatgagctgtcactctgctgtcattggatcagttgtagatgaggggacaccttttggccttcatttgatgtctttctcacgtgcttattccctcatcttgtttggttgaaaatcacattggcaaaaccaaatccagaatgctagggtatgactaaatggtagaacaagctaagcaactatttctaggggggaaaatttctgtgctaggctttgttactacagtggttgaacatgggctttagaatcagaaagatcagttcagatccccacattggaacataaaagttgtgctatcttgatttaatttcctttagccttgttttccttacctataaatagaaattataatagtacccacctgtaatggttggttcagtgagataatgcctgtgtatgccttgggcctggaaatgtccctaatgcagaggacattcactatcaaaagggagagaaggccccctggagttgctacgggttgcagtattttttttaaaaccagaattcctaatgggttttttttcccctccttttagtgatattgtattttgcttaagtgtgttagatttagctctcgtctggtttgtgttcaagctccctttcaaaggtgccatcagtgctcaaggccaggggttcagctgcagggatggtggatggtagccagctcttttaggcatggtactttttttttttttttttaaagacagggtcctactctgtcacccaggctggagggcagtggcgtgatcacagctcactacagcgtcgacctcccaggctcaagtgattctcccacctcagtttcttgatagatgagactacaggagcacaccaccacacccagctaatttttgtattttttttggagagactgggtcttgctatgttatccaggctggttttgaactcctgggctcaagtgatccacatatttacagtggttggtgttcatttagaatttaatgaggtgaacaagagtatatttgcacctacatgttctaggctgaattcggatcttctcatttagaaggagtacaattaataaatcattatggatcgtattcaaattactatttttttttgagttgtttttgtttacttaaaagtagatttttaaccatctagcttgacatactattattatttagcctaaaatctttgctttctataattataagtaacctatatcacttattttgccttttttttttttttgagacggagtttcgctcttgttgcccaggctggagtgcagtggcgcgatctcggttcactgcaacctccgcctcccgggttcaagcgattctcttgcctcagcctcccgagtagctgggattacaggcatgtgccaccatgcccagctaattttgtatttttagtagagacagggtttctccatgctggtcaggcttgtctcgaacttccaacctcaggtgatcctcccgccttggcctcccaaagtgctgggattacaggcgtgagccaccacactggaccctattttgccctttttaagtactggcttaacgagtgaaaaagatgcatgtgcactgaaaaaagactaggaaaagatagaatacaatgccagtagagattgtctctatgagacagcataggctattgttattttagacgtaaatttctctacttttcaaaattaccacctatttggataccttttcttagttttataaaatatggccattggggaaaacttgaaaattgagcaaaatacagagaagagaattttaaaatgacccatgattccaccactcagataactacagatggcattttggtgcattgcacttgtcacttgtagtcagaacagcaaatgtgcttcattttccaggcctgcaatttgttccttttgcacacatttctgacaacctgccctggactgcgttctcatagaatggctgtcctccccactgtgggagcccttgctgagcctaacaaataaagcctccttcacaatagagctaaagaggagcttcatcagagaaacactgccgccttagtagatactggcccaggttggtcttgagtcccaaacttgtacagtgggttctcaaagtgtaacttaaacattatgttggcatcatgttaagcttgtttatttatagtaaagctcaaatatatagggaaatggaattgttcctgcattgagcccattcagaaaattttctgtcaagtttgggcagaatttaaagactatttcctttggtgggcatgaagtagtactgtttaacatgcttgctcaataaagttttcagactttttttttttttaactagagaatatgtgatttggtgattgactctataaatagtgtgacccatttttaactagattgctgatatgtttttcagcaggactttgtggtttagttaatgaaatcttttcagggatgatcctctgagccttctgtctagttactatcactgctgttgcttttatgacttaattgcctttgtggtttaattcacttcatgacacatctatcaccatgaagtttagactcttcacccctatctttccgagtatttgcttgatgactcctggggtcaaggagaggttgataggtggttttatgctgttaaaaataagtggtcttggctaacttatcacttagttaaaacagtccttttaattttaattaatgcattgaagctacttcttcctcataattttctacttcataattctgttgtctgagcccataacaatggttatttctattatttgtagagaattataaagctctttcatatttgttctaccatttaatccctctatctttatctcctcccctcccctcacccccctcccccccccaaaaaaaactgtattagccccattttgtagatgaggaagctgagacaaagaaatcataggcaagtatgccaggtcggtatggttaatgtatggtagaactgggaatttctactatagaaactggacgattgggatattacgatttagaaaagagcctctgtttttttattgtctgctattactgaaattaccatagtgttaacatcataaaaatatgtctaaagactcatgctgagttctggattttgacagattttcaactaaacctaggaaatttgcttggtcagtctttgatttttgtggacatggttgggagttcacctggcagtacagcttgtgattaaaagtccagttttagaggaaccaaaatctgttcttcctttagagccaatctctgtttgcattgagttttctcattttcccctagccatgaatgaaatatcaggaaattccaaatgcatctcaatatcagaactgtcttctttgtgctaccctctgcatagcactcctcggtggctgccctttgcttctgtggtgagagccgcatgtggtggtgcagcccacaaggccgtcctggtcacgcctctgtcttgcctcactgcttatcttgcctcatctgcagcagcagttgcataccgtgcctcatcttatgatgtgtccattcatgtcagcccagctatctacttgttcatctcattgattctgcccattgttgaggacttagtctaagtgtcatagcacccaaagtcttctctgataccttgccacccatcacctctctgttagtcaggatgagttagtttttctcctctgttgttttataggaaattgtgtacctctgtcttagtacttattcattctgttgaaattaattgctcacctgtctctctgtgtccaccatttgactcccaagactgaatttcgtaaaaagggactatgccccaaagcaagcattgtgctttttaaaatagtaggcactccagatattatcaaatggataatccccctgcctagcccactctttgatggataggtgcttcaggacatgtttggtgaagtactgaaaatctaaggctaccctggtcaactctcacctcttttattatgcgtgtaagtcatttgtggtgtggagcatcaggcaaatttaaaataccaactggctccctttccctcaactgcccgtgatagttgtagactcttcattgtcattcttttttttgaggcgcacaccaccgtgcccagctaatttttgtatttttagtagagaccaggttttaccatgttggccaggctggtcttgaactcatgacctcaaatgacccacctgcctcggcctcccaaagtggtgggattacaggtgtaagccaccatgccttgcctcttcatcatcattctacaggcccatttcttattagttgatatgtactgagggagttgaaattatgttttatgtctgtcaaaaatatagatgttgaaaaattaaatctattgttgaaaaaactttaaaaatgatttccggattctccatgtttgggattcccttcctgatgctaatgttaattgctttcttccttgatgctaatgttaatttgactataaactattgttttatcaaaagatcttagttacacttactcaatttttgcttaagatactacaattattttaaaaagaacatccgtatcttattctaaaggactgaattatttttgtatacagacatacatacagaataaaaaatgtacaacttgattttagtctgtttgatttaaattttatatattgagtagttcacccctgtctgcctgtattcaggtttcttattttgatcataacatggggttgggttattttcgagtttggagttgagaatcttatttttataatccagtgggagaaaacactcaagtatattttgaattggacaactgtgaaaatcttagcttatagaatctaagtttggagtagacttttgaagtcataacttataaaatttatcactaagatggatagttatgtgcatttaaaatatttctataataattgaaggagcttgtgataacattataaattcaagaatgttttgctagaagcaaattgactatgggttttaaaatgtaagcatttcctaaattaattctatgtcaggaaatggagacaacttttgaggaaggaagctgcttgctgaggctgtgcaaacattatttctctcaagtgtattttaacactaaagttaaaaatccattttatatattaggaaaggcaacttaaccatagtagaaggagtaagaaatttggagccagaaattcctgatttcaagctccgccatcaccggttactcctttgtgactttggactagtgttttgactttccgcaggcttttggttttctcattggcaaattagagcgtgggaattgggaaatggaggtgcttatcgctgttactcctacctcaccaagctgttagatgatcacttgagaggtggaagggaaacatttaaattgtccagcactatgcagatgatgtgtatctttctctcatagaaaggtggttacctgttgggtgttggggagaaaaaagtaagagaaaaactagaggcaggtggcaggtaaaattttaccactttgctctggattgctagacccatttgaatcactggaggaggaacaaccatccctagtctacttggcgtggcttagacctaaatctgtgggccccttgccataggttgtacatattatagattaacagttcccattttgagtccctctttattttttgccacaggatcagataaaaatctgtgacttatagttaaatattatttcctgaatacttaattatattcacttattcaagaaatatcaaatggagcacttactgttttatagtaattgttctgggtgttggggattacagcaatggaaaaagcacagacagaattcccttcttcatagagggtacattgtagagggagacagataaagcaaaaaaatgtaaaattaagttcaggtactgataacttttatggagaacacaaatagggtgacttgatagagcgagggtggaaaaaacttagtaaggattgcccagaggtatctctttaaggaaattatatttgagctgcatcctgagatgtcagaaggagccagaatgagaagagttggccaggcacaagtgctccatactgagggagctagtacagacactcagacctgggtggagtgaaggaaacatgtttctagtttgttaggctctgaggtctctggcctgaaatacttaaatttttaattggaggagaaaagcaccatagagataagacagagagatggggaatacaaatacatgttaagttacatggtccgagcattgtgagtatagctgaagaatttatgtggtccattggtatttacttaaagtttaccctaaatatatgaatgaaatggcttcctagctcctttcatccttacatctgctaatttaaccttatgcagagagctgagtttgttccgcttgtgccctaaggttattaacatctgtcccttagtctctccagtaaaaagtttgagaggaaacaaagaaccagctctacttagacctttgaccaattgatcatgtggatccttgggggctttatgttaatgtcaatggataaggtattctctttgcctttgaattgattttgtggctttaaaaaaacatttatcaaagactaaaggggttgtcagtgtggggagagggacatttaaaaaggagctattaatccaagtgactggaaagaagtcacttatgtgcatttacagtgacttgctaaatagaagtcaggaaatatttgagtgagtgaatgacttgctaaatgataatacttgtagtgaaaggtaacaccttctaagtgcctactctgctagattgcctgcagtatcaaggtgtttctatacataattttccctgaatctctctaagaaacccgtgaggttagtattactatcaccattctttatatgaaaaatttatggcttaactagttaaccttcttgctgaaggtctcatagttggtggctgaataaatttggactgaggactttatgatcccagaatcctagttaatcataacaagtcatgacttgccctgatgatgttggaactgtaagtaagggacattgagtgaatattgtctgggggaagaagtgatgaataggagtaaggagatctaacctaagagcttaaatagtgatgtgaagttcttggcactaatccttaagatacctctcttagagccttgagggggtgccagtgaaacagctggtagtaaagtccatttgagtggtccagttttggagttgcttaagggtcagatcactttctatttctgacttaaggctagtgtaactgatctggtctttagttttctcgatttataaaatggagatggttaagtgatggatataaaaatgaatgaataggctgggagtggtagctcatgcctgtaatctcagcactttgggaggccgagggaggaggatcacctgagatcaggagttctgaccagaacctgaccagcctggccaacatggtgaaacaccccctctactaaaaatacaaaaattagccagacatggtggtgggcgcctgtaatcccagctacttaggaggctgaggcaagagaatcgcttgaacccgggaggcggaggttgtggtgagctgaagcttgcggtgagccgagatcgcaccactggactccagcctgggcaacagagcaagagtccgttccaaaaacagtgaacgaatctttcattaattgagtacctacaatgtggcaggaattgtctaagcactatggatagaacaatgagaaagagactaagaagtatgtgcattgaatttgttttttagtggggacaggcagtcaagaaataaacagtatgttaggtgtcagtaggtgctatgaagacaaaaagagaggagatacaagagagaatgattgttgggcagtgtggtagcaggaggggagacttcatgagcaaacttaagttgtgatggagtttagctgtgggggtccgacagcacgaaggtcctcaggtaggttcatgcctgacacattcacgaaacaacaaaaggaggtcatgtggccaaggtgtagagcgtgtgaggaagaagaggttggaaaggtggcaggagccagattatgcatggcctgctgactgctgtcaagactttggcttttactctaaataatagggagtctttggagttttgttgttttgggttttccatttgtttgttttgttttgtaattttgagaaagacaagcagcactgaattaccatatttacacttaaaacggatccctctggctgctctggaaaatagattgtgagagtatgaggtggaaagagggtgcccagttaagaggctgttgaagtaagtagtttaggtgagatcatcatttagttggtgatgtacttcctgtgtaaaattgaaaacatcacacatttgaacaaggttgaaattaaacatgagattgtcacatacaaccactgtcactggggtgggcagatgcatagaagactattggttgtgtaaacgtaaattggacagcgtgtttcagggagtgcagatgcgtgaaggttggctttgagcctctgctagacttgaccaggttcataggttaaaactgtttttatctttattctttcaatatattagtattacaatagaagacttagagaacaattgaggggggaaatgatgttcctttttttagggtgaatgtgtcagactttcaaagatgactctttggatattaggtgttcatatctacttagaactggaacagaaacataaaatatacaaggcgttcttttccgggcagtataaaaaaataatatataatcagttctaacataagatctaggagccgtttctttttttaagccaaaaaggcaaaaaagactactccattaatccatgtttctcagtggagatggaatgattcaatttgtagagtttttttttaaagagcagttttaaatttacagaaaaatcgagccaaaagtccagagttcttatgtaccgtctcattttgctaccattgccactgtggttttccctattgttaacatcttccattagttaataattaggtaataacatcttacattagttaataataatgtattgatactgattcattaaccatgacaagggtgccacactaatgtaagttcatagtgtagttcactctatgttgtacattctagggatttgacaaatgtgcgatgatatgtatcctctgttactgtatcagagtagttttagcagcactaaaaatctcctgtggtccacctagtcgtctctccttccctcatcctaaacccctggcaaccactgatctttttgctgtctacatagttttgcctttttcagaatgtcatatagtcagagtcataaagtaaagtatgtagccttttcagattgacttttttcacttagcagtacgcatttaaggttcctccatgtcttttcccagcttgataggtcatttctttttatataataatataaaaataatattccattgtccagaagcactacagtttgtttatcctttcaggtaatgaaggacatcttgattacttctctggaaacattttttggtcaccaactaagtggtagaggggatactggcaattagttgacagagggcaaagatgctactaaacaccctgcagtacacaggagacccccgcaacaaagagtcatccagttcagaatatcagtaatgcttgaggttgagaaagccctagtctaaatatatcttaaatagtataaagaaagtattttaggcatacacttatagttttgctgtgctagaatagttggagaatctcagccttacagcaaccccaggagcaaggtgtaatacaaattccattttgtagctgaagaaacagtctaagatgttagcatgcttcctgtcattctgctagtaaatggccaaagccaggattcagacctggagcctctgtctccaggctcagcatacacaggcacctccaggtgtttgtggttttcccttctgccttaggtatggattctttggtttttaaccaaacaaaaaccagagtactcttttttttcccgtggtgacttaaatttcttgtaattgtttttatttcagttctcttgagtacataccaggtcttacaatgttgtagaaacagcaaagaaggagaagacacgatctttccacaggaagaagaactttccatctgattgtcttctggagttcttatttcttcatagttttctccccttagaagtgattgcaccagaagataaaggtacattggtacatgtcctctggtgattcagctcctcctagccccagaaccaaaagcctcttttctccagagaaccgtttgtttaatgaagctaatgaaacttgagatgtccccacgtgcccctccccctcagctggtgtctctccagggcttggctgccacctttggccttctttctatggccattaatctagtgctcccagcagatggcagctgatctggataaagaacttggttgttcttttcagtgcccattagaggcctgccctctctatctgttcttcctgtttgccatgaagaacagctggccgtgttggtttaaaagccagaatttttatttgtttggagttttgcctcttcatttttagcatttctctctcatctctttctgcctttgagatagctgttcacagtgccacattttctgtgtctgtgaaaaaacgagccccttaacctccagtacacaccatagacatactcacccccttctaaaatatttattcttttagcagccctggctggtttccattgtgtttatttaatctttcaagaattttcttataaaagactggacaatcaatgcctttttactgattaaggtgaaaagttgtacatggtttttcaaatatttgtgcaaatgagagaatgtatgagtctttgcatgcatgcagatattatacctaatgttagactatagctgtaggcagattatctatttacctgtctttctctccttttggaatgctaactcttaaagcacagagaatattagtagttgagtacttaccaagtagcaggctctgggctctagattttggggacacccctgccatcgtggaggttacagtcttctcattacaactctgacccagtcattctacttctttgaagattatcctgtatgcaagctttacttagaattgcagaaagaatgagacatccttagtggtaaacattaatgaaatctacgaatagatactctcaacaacaatgcatatgcatatctgttgacatggaaagacagtcgtgttgtattaactggaaaacagcatgatataaaacaacacagaaaggatgatcccattttatgtacctataaggaaatattgtaggatatatttctggttacattagttatttctggttgctagagtttaaggacaattggggttttttgggtagtgaacatgtgatttatatttaatcaatatataaagaaatagagcaagaaaaaaacaccactgccatgattattcagataggcagacttttttcattcattcaaccactatatatggagtgcagctatatgccaagcacaaggcagagaacacaacatgctacagaagtccatgcctttagagcattctagaacacaatttacattaaaatgctactaggtaacagaaggagcagcagtgtatgtggattagagtcacctcaggatttccatcgtttctcagaacacactgttttgtttgtgggtggaataaaggaggctgccatgttcagtgtacataaagaaagcaggaggttttctcaaagagcaggcattggtacaacatgtcatttaatagttaagaggtgggggaaggtagcctaatgggttatgccagccacttatctttaggatagtctggataaaatataaagtactatttctcatgtcctctgcttatgctgggtccccatacaccatctgaactaatggactttttggcatcatctccttaaatgcatcatagggaatgaatttctccaccaagaagccccattatggctttgtcagcctaggttttgatttagcgatagcaatatgtgccttccagacataggatggcaatgagggagggcctctgctggtccttaagtgcagggagccccccttcttagagattaatcatcattgtgacagatgtgcttttgctgaaacttggtccagagagcagcagataaagatttggatgatgtctccttccttctttcttggccaaaggaagccagcccagtgctgggctttcaagaatccagttgtttagaaaggagggaggtaataaagcagaaaaagatgttttatttttagaaattaatgtgcagctttctgatctcccaatccagttcaggttctttcaacttcattatctgttgagaactattagcctaagaaatgatgtgactgtggttctctaccttggctgtgtgttagaatcatgctagaaactcttaaaaatctaggccacatcctagacaattaaatcagaaactctgggggaggggtctaggcagcagtgttttaaagctgccaggtgattccagtgtgctgctagaactgagaacttccacaatatggttataccagctacacaaggcagagagtttttaccttgaaaaaattaaaaaacagcagtagtgtaaaaatattatcctcttattaaaagaagaaacatgtgacagagtgaattcatttagatgtcttgtttggtttgattttaaattaccacacttaaggttgaaagccttatctgttgttccccattctcatggcctgatcactgtgaaattctgggaccttagaagccttttgtattgactgctcgctcgctcgctctctctctctctctctctctctctctctctctgtgtgtgtgtgtgtgtgtgtgtgtgtgtgtgtgtgtgtgtatttttcttttacttcttgtttggccaagaaactgtatgtgttaatagcttgtttgtttttcgtcttttgttttggctaaattgcttttcaagaaactgcctgactccttgtttaattaacttccatatcctgcatatgtggctcatttcacagtccctccatcccttagtggttttccagtccaccacgaagatttgtatgaagaaaatagccacctcatctatttatactattttatcttgatgtttttcattgtttctctgaagcacattatttctgatcttgaaatgtaatgttttaaaatatatttttataggaatttatttttctcctctgaattgcctttgttgttattcctttggattttgaactcacttaactctgtgctggaaagtttctgctgatttttgtcttcttgatctctctgtttctttaaattctaaattattttgcatttttccttactgttgaattgcaacacttagtctctctatcttgtcacaatttatggagaatgatagcagaatccatctcaatagtatagcaactaaacatgtatatcatcgtttcctagctgacagcctgcatggagatgcatcctttaaaaaggggatgaggatgagaaaggtactgtgccatatagtgttgggcatacaaccaagacggcagtagacacaatttgttagtgatgtccagttactagtattgctgagtttatttgtgacctacttttttaccttttgtattccctgtgcatacgtgtagcattaaaacagtgttctgttgccaacatctccaaacattagaaacataagtaactgtttttttcagtttccctgggctccacagaatgtagagtgggcacatctgcacaaagcacagggcacagcttgcccttgaacgcttcacagcctctgtcgttgccactgttatccgcttgtgtactcatcctagcctctgggcagacctgcagaggcacggacacacgggcatccagcttattccttcccttttttcacctccccatttagcttgtcttctttacccactttccacagtcctcttaggtaagaggccattcatttcgttaataaggatgtttgtttatttgtgtttcgaaagtacatgctatgttccaagcactttgctagctgctaggatgcaattgactacaagacagatgtgttttctgccgccctaatacctgtaatctggtcgggcagacatatgaataaacaggagtttacagtggagtgtggtcagtgctgtgatggagttagtgcagaggttctgggagaccatggcagggcacccagccttgtctcccgagtcaaagaaggatgtccagaggaagtggcacctcaactgagatcagagggatagaggtgggagagaacctgccacttttgaggaagtaaaagatgtatgttatagctaaaggataatggggaacaagaacggtaatgagcctggaaagatggggggcttatcttggaaaggcatggaaagcctttagggtttgaagcaaaggattggcatgctctgatttgctttttagaaggaccattgtgactgcagtgtggagaatggattggagagggaaagcataaatgaaaggtaacagtgtttgtagacatgacccagtgagagctattggtggcctggcctcgaagaggagatgggatggagctagcaaagatagggattcaggaaatatttaacccatgccttctgtctcagggcaggagtgattttcaacccttgaaaatgagggcttgtcctgcctgtctgccatttggagtcttcatctatgttgtacatcatgttgaaaagatgtgtattagcttcctactaatcaaagcatgtttgtggatatggacaccattacaggtttctcatgcttcccttggctcccagacactgggctaaagtgttggattggttgtgcagtatccatacttgtcaactagctatttgtcatttattttgcaccctagaggccaaaaatgttagagcagaatgattccttaagttttatcccatccaacacccatgtttagcaatgaagacatggggattcaaagaagggaagtgatttgcctggactcccacagagaattgggactggaacccagatgtttcagctcccagttatgtgattctttgggccagacaatggcctctctggccaatttagctacaagagcatgtcactttgccagttttacttttcccactccttttcagcagcagtgagttagtctaaaatgtggcagttaaataaatcaaggctgattttgggtgcacccttcctttaaggcaatgggcctctccagaaggaacagtgtgaacattgtcttccagctctacctctgctccccgcccccccgctttgttttctttgtctctgacagcagtggactcagaacctaaattcccccttcttaagccacttggtgagtggcagggagcagtaggactctgagaggttctgggggttttattgtgatgggagatagtcgtcctgcacttctgtagattacaggccagcaggtggaagcctgggctgtggaatcagattgggtttgagtcccaggtctgcttcttggccactgggcatgcaaggccttcattttctcatcagtgaaataggagcagtcatacttagttgacccttgaacagccacaggtgtgaactgtgctggtccacttatatgtggattttcttcagccaaacgtggattgaaaatgcagtatttgcaggatgcaaaacctacttataaggaaggttgactttctgtaccctcaggttctgcagggccgactacgggacttgagtatacacagattttgatgcatggggggagacgaactaatctcccacaggcagtgggacaaccacaattagacttcagattttaaaagataatatattttttaaaaaccagtgcagcgcctggcccatagttgatggtaactatgcttaaattagattattattcgctgtccttttactacagtttcccaaaccatagatttaaccccccacacagctgtctaccatcagttgccctggtatcagttttttaatgaaatttcaggagtgtgggattctttgtctctgcccttctaataggtgggaactcttacctctctcatccacttagccccccaaaaaagacagttaaacttgaaagctaccagactgtgaaaaagtaaataagaacccctggccagggagagggcttcagccttagatgtttacaagggcctgaagcagagaaagagatagaaaatatgtaaaagcaaattttacctgcttggaaagtagcttaattttttttttttcttttaaactaattctgtagtcggccttgtgctctgtagagctggatgaatggttaaaaagaaagggggaaaagccagaagaaattaattctgtggcacagagctgtgaattcttccttgatgcaggatctgaggttgaaggaggttaaatatgtgagggccagaaggaagtatcatgtaatgaatgataaatctctagctgctcctcagcagggcaaaacatgggcttagcaaatgggaaaaaaaaaaaaaaaaagggaagtagcaggtggagataatttaaatagcacagggacccctgcttaccaatccctccacagagttttgccctggagtaagcatgacatcagggtgcttgctgcttcctccagtggcccgagctctgtgtgcctttgttgaacaaggttttcgtggagctgaggtgactctcatgaacagagaatacctgtccttcatacagagaagcacccaaatgcaaacatctactttttctggtgttcaaccaggtaaacctctgtttagcaagaaacatcatccccagagtggggactgtcttgtcctttcagaagctagtaccctaagcaagactcataaggaaggtcgggcctccctaggtctctgtttcttctgaacagtgatgagctaggtgcagagagagttaaaggtcactatgcagctgacaagtgtgaccagttcccagtaaattccacttggctggggtttcagaggtgagcaaggcaggctttttactcattacacaagaatctagacatccctttaattgggtggcattctgggtgctaaaaggaaggggctttgagaggcaaagatgatgggatatcataaatttttttgtttcctttttaatatagcgcagctcctatacttaagatttaactttgaaatgtagcatagctaagatctggtccaaaaagatttctgatatctccatgaatcctagttagggattgataggaaaaaaaaaatcttgtgccacagcttcatgctatttttaggaacctttctgaaaccagtggcagcccaagttagagcccagcattaagtccacctcatgcacatcatacagttgcagcttatggtaaaagctttctgcaaagcttttctgctcctgggttaaggccttccagcatcagtcacatgtaattaacagctacattgtgtgcttactttttgctagatgtttcataaacattatctcatataaacctcacaataactaggtattattatcccgtatccctgttttacagctgtggaaagtgaagtgaaggatttttgtcatacagccagtaagtgccagaactgacttgaacctagctctctgtcttgattcaggaactactgctctttccattggtggctcctggctaatcaatgtgatagtctttgaagaaaaaaaaaaaagagttactatcttcagagttttaaacttatctgggagagaatttaggacttttctttgtgagacagtcttgctctgttgcctaggctggagtgcagtggtgtgatcatggctcactgtagccttgaacttctgagctcaagtgattctcctttctcagcctcccaagtagctaggactccaggtgcatgccaccacacctggctaaatttttaatgtttattcatttatttattattttgtagagactgggttgcgctatattgcccaggctggtcttgaactcctggcctcaagcaatcctcccacctcagcctcccaaagcactgggattacagatgtgaaccactgctcccagcctaggacatttttattattcctctcgctgttaatccaacaaccctgtccacattcctgtaaattggctttgttcatcttttttacttccagacatgttaattttaaaaagaaggcatcttactatctttttaatggcttctgttttcttccaagttaaaccaaagagtcatttgtaatttgcctcagtaattggactgtgactttaaatggctgctagaattggccttttgttgactttactggagttaaaataattctctgttttcattagccaagagaaagacttgtgactcttgatgcttttcccactgcaggagcaaagcagtaaccccagtaagggagaagagaacttagatttgtgtaagtccactgtgtgttggacacttaaacatactttagatgtattatctcattcatctttctgactgcatgaaggtgctattgctgtccccattgtgtaggtgcagagagagttaaaggtcactgtgcagctggacatgtagtcgatctgggattcaaacccaggtctgtccagctcatgttatttctactgtatcacacttctcacctgtatatgttgaatggccagagtgaaggctgggctttatgggatacagaggaggtgactgtacaccaggggaaatcagtgtcacctttctgacgctccgtggcattaccctcattcagaactcattaccaaatacttcatgtaagtaacctcgaaagtcttatgagtacatcgagaactagttccaagtcacagaactgttcttgtggtgaaagtggttgaaaggctatagttcattttggttattggatggaaatgccctctctctctggttgattaacggagaagacttagtataccagccattgtttcttcgtatggaacgttgcttgttttgtcccattttctcatctgcaaaatgtgggtataatacctattacgtaagattattgtgagaattgagaagtgtgataatgtaggtaaaacattagcagagtatttggctcttacatagaggctcaaattgcattagtggcaggaggaaagtctgttttattcattgttgctccctcagcagccaggccattgcaaggcacatggtgcacattcagtaaatgttggtgagtcattgatttcttttctccctttgtacttattttttacagatatttgagcacctagccttgtgctggacaataggggacatggggtccttcacacaagaaacatttgtagcctcatgagatagatggtcatttgtgaaaataatctaaagaaaatgacccattgttgagtggtagatggtgacccttgaggctatagtgtgcaaagctgatttggaaatccctccagccagctctggggctgattgtggtgggggtgggggaatccttacttactacttttggccctgctgtcagaattggaccttgtactgtcattctaagctgggttgagcctgagcacgtcttgtcacctctgtgactgaaggctgatttaatatgtcatgaggcagtttggtttcaggaagtggtttgctggggcatgagcgatggatgttggaagttagaaaagagccagaaattaaaatgctgcctcagttgggtgattgaatccagtcttacctggtggggcaaccacttattgatttggaaagccttggtgaatccattttttgctactcacactggggaatggggaccagcagcatcagtatgacctgggagcatcttcagaatgctgaatctgagcctcctcgtcagacctgctgaatcagaatctgtattttaaagagatccccagatatttatgtgcagtgtgaaaagcaagctttggaaaagaaagggcaattctgtagactttaagcttaggaacaagagtatttttctggagtcatttgaatgtcagtcgttaagcagggctgccaattagggctgattttctcactgtttaatacttgccaagtatcttgagcagtggcttcccagactgagctgctaactgaataaaggtggcatgattgccgatgaaaataatagtacattcgagttttaaaatgtttttatatagatccttttctctgttcacagaacagtcttgtgagatcatctcatctctgctttacaggtaataaaactgaagcacagagaggttatgtgacatgcctagagtcacacagtaaaatcagtagcagttttgaactgaggtcttaaaattccaagaagttgggagcttgctttttttttccttttcaccatctaaattttccacattgagatatgagagaaatcctccatttctgccattgcatttgtgtaggtgcacaacagggaacgtgagacaattatagtagagaataatctggaccaggaatggcgttctgcaataatcacctcttgaacaataaacttggaaagtttcgtggttgtttctgattcagagcctggaagagcaagccatttccctcctcctacccttggtttactaatcattcacttcctcttctgtaaagcccaactcaaaggacccctgctttgtaaagccttccctctgggatgggattggggggcaggcagataattggttcctcattcatattttattcatacttctgttaacaaagctgatcacaccatcttaactgcacatcttattacccacatgcgcagacaaggctgtaagattcctgaggatctagaaagagtcttcttcaccattgtagccccattgtctggcatgtgttggtccttcatacatgttaagtgaatgaatgcgtgtatgcatgattcagactttgttttttgcctttcttttctttttccctatagtctgctctttatagatttttaatagcatccaaaagggtagtaggggcaggaagctaaagggtaggaaataaaactcaaattcttcagtttcgagttcagttctcagttcagctcctctccagcagcttttaggaaagcattttaaagaaagggaggctcacttggggcttgaggatggtctggtccctcacagtgaatagacaagcatcaggcgcagctgcagtttttacggaatacgtgcacattacctttcctcagtgtcccctcgtaagcagtgaaatgtaataaatggcgttttagggagccgaagagttgtcaagtttccacagtttggagaactttaacatatggcatcttgggatctaatgaaataaataattcatgcctggaaatataagcaagagtgaatctctctccttgctatgtgaatggggactttggttgcctttttcaaggtatgtatgaaacatatttattcagtccactcatttatgtccctttactttctcactcactcgtcaaacttatcagcctcctcttccccttccttttcccctcttcttttccctcctcccctcatctctcttctcaccgaaaccctgagggagataggaaggtaataagtattattgttttgtcagtgtctccatcacacaccttctgtttttctttcttgaggcatctcagagggaagtggcaggagatgactttcagcagacctttccccttagtgaggacagtaagtcccaaggacatgtggaggcaaggatgaggggcagatgaacaagcagctgtctggcctaggtcttacagaattatttttcctggaattaatatgcttagaatgtatactttagcaagtgtctatttctggctccagcatttttctttgggtgtcaaacctggttttatctctgagatttttcgacactaggagaatttgacattcacattctaagagtgttctgtaatgtttccatttacataccagttttcttcattttttggctggaggggtatgtgaatatatacaagaatctgagcagattcatttttagctgcagcagaggcaagcctcaggggaaaagtcaagataactggattcctgaaatggtataacttggcaactcgtcttttctgttccttagcctgtaaagcattatttggttttagaagaggagtagctcctacttgtgaaggtcttcattggaatggcacattgaatgcatgaacccttaaaatccttactccctttaacccaagccacatctcagtggctttaaagcatatcaaagcaaggaggggaaagtctgtgtgatacggtactaaaattgatcctgtagtaccaggcatgaggagaggaaggaggagtatcatcattatcctgttaaggatttgtcatgcctcagagcatctgcaaggaaatagtccacagataaagttcagcaagtgatttgcaattggtagaggtggtttggcattttgaaaagctttataaatgtgactgcagcctgagaagaatgaccaccactggaatgagggaaggctggaaggatttaaggggttctttatgaaatcaggcacacatccccatgtcgactaggctagactcaggcaccataatagccctggttcagggtcactcctctttccaggaaggtttggatcctacagttagaaaagaggaatcttggatctctaggtaagggttagagaaagtattctgggcatcccaagttagaatctggtgtctttgcttaacgagttctgaacatttcatgtgagggaatatgggctactgttgtaggccttgctgtttcacctgaaccatccctgcccttgaaggacttaaagttggaaggaatgtgaggaggcggagtagcacagttatatgacatctaatccaaagtagaatatgcgagccttaagagaagtgcagagggctgtgaggagtatgaagtggctggcaaatagattcagtattatatttcatttattcattctgcagatatttatggaccacccttttatgttgctattgctgtgctagtattggagatacaaagatgaatatgacacctctcgggccgttgccaactgtcgagtaccaggaagagcgcttagataaatgaccatgtacaatggg

SEQ ID NO: 947 - DNA, 160 bp, Homo sapiens
  full length sequence of bloodCirc_07290
cattcaagaaaaagatgagaagttaaagactgtggaagaattacttgaaactggacttattcaggtggcaactaaagaagaggagctgaatgcaataagaacagaaaattcatctctgacaaaagaagttcaagacttaaaagctaagcaaaatgatcag

SEQ ID NO: 948 - DNA, 201 bp, Homo sapiens
  full length sequence of bloodCirc_21493
ggacagagcagaatgggctgatatagatccggtgccgcagaatgatggccccaatcccgtggtccagatcatttatagtgacaaatttagagatgtttatgattacttccgagctgtcctgcagcgtgatgaaagaagtgaacgagcttttaagctaacccgggatgctattgagttaaatgcagccaattatacagtgtg

SEQ ID NO: 949 - DNA, 528 bp, Homo sapiens
  full length sequence of bloodCirc_02565
agtaaaaagcgacaatatgaccaggaaattgagaatctagaaaaacagcagaaacagactatcgaacgcctggaacaagagcacacaaatcgcttgcgagatgaagccaaacgcatcaaaggagaacaagagaaagagttgtccaaatttcagaatatgctgaagaaccgaaagaaggaggttataaatgaagtggagaaagcacccaaagagctgagaaaagagctcatgaaacgcaggaaagaggagcttgcacaaagccagcatgctcaggaacaagagtttgttcagaaacaacagcaagaattagatggctctctgaaaaagatcatccagcagcagaaggcagagttagctaatattgagagagagtgcctgaataacaagcaacagctcatgagagctcgagaagctgcaatttgggagctcgaagaacgacacttacaagaaaaacaccagctgctcaaacagcagcttaaagatcagtatttcatgcaaagacatcagctacttaagcgccacgagaag

SEQ ID NO: 950 - DNA, 165 bp, Homo sapiens
  full length sequence of bloodCirc_13738
gttattgaggtggtgatccgctcagaagaggggctctcaagggacatggtgaaacacctaaacagcattgaagaacagattttggagagtttagcatggagtcacgattctgcactgtgggaggctctccaggtttctgcaaacaaagttcctacctgtgaagaa

SEQ ID NO: 951 - DNA, 244 bp, Homo sapiens
  full length sequence of bloodCirc_09181
actgtagtcagcttttaacctctggaccagctacattgcctgatcagttgatggccataagtcagccaggccaaccacaaaacgagggccagccacctgtgacaacacttctttctcagcaaatgccagagaattctccactggcatcctctataaacaccaaccagaacatcgaaaagattgatttgcttgtttcattgcaaaaccaagggaacaacttgactggctccttttaactggatat

SEQ ID NO: 952 - DNA, 346 bp, Homo sapiens
  full length sequence of bloodCirc_10581
gtatttgacctgtccaaagacgacttgatacctctataatgtaacagaaaaggtcagaaaatattaagcaagtagaagtgtggagcatattaagcaagatgaacatctcgggaagcagctgtggaagccctaactctgcagatacatctagtgactttaaggacctttggacaaaactaaaagaatgtcatgatagagaagtacaaggtttacaagtaaaagtaaccaagctaaaacaggaacgaatcttagatgcacaaagactagaagaattcttcaccaaaaatcaacagctgagggaacagcagaaagtccttcatgaaaccattaaagttttagaagatcg

SEQ ID NO: 953 - DNA, 323 bp, Homo sapiens
  full length sequence of bloodCirc_16418
gtgttgacagctcttctaccacaagcagtgcttctccaatgcccaacagttatgatgccctggaaggaggcagttacccagatatgctttcttcatcagcaagcagtcctgctcctgatcccgcccctgaacctgatcctgcttctgctccagctccagcttcagctccagctcctgtcgtccctcagccttcaaaaatggctaagccttttggctatggctatccaacacttcagcctggttatcagaatgctacagcaccacttatttctggagtacagcccagtaacccggtatattctggattccagcagtatcctcaa

SEQ ID NO: 954 - DNA, 257 bp, Homo sapiens
  full length sequence of bloodCirc_00480
gcaacagaacattgaggaaaacatgacaatagctatggaagaggctccggaaagttttggccaagtagtgatgctttatattaactgcaaagtgaatggacatcctgtgaaagcctttgttgactcaggtgcccagatgactatcatgagccaagcttgtgcagaaaggtgtaacataatgagactggtggaccgtcggtgggcagggattgccaaaggagtgggcacccagaagattattggaagggtacatctag

SEQ ID NO: 955 - DNA, 247 bp, Homo sapiens
  full length sequence of bloodCirc_07128
agagcacgttttcaatatcataggagcatttgatattccacgctttgtgtacaattcagaaagaaaaaaatttcttcctctgttaatgaccaaccaccctgcaccaaatttatttggaacaccaagagataaagcagagatgtttcgtgagcgatataccattttgcaccagaggacccacaggcatgaattatttactcctccggtgataggttctcaccctgatgaaagcggaagcaaattccag

SEQ ID NO: 956 - DNA, 195 bp, Homo sapiens
  full length sequence of bloodCirc_09687
atgaccgtggaaaaagtacagggtattagcagattggaacaactttgtgaggaattttcagaagaggaacgagtaagagaactcaagcaagaaaagaaacgccaaaaacggaagaatagacgaaaaaataagtgtgtgtgtgatattcctactcccttacaaacagcagatgaaaaggaagtaagccaagagaag

SEQ ID NO: 957 - DNA, 387 bp, Homo sapiens
  full length sequence of bloodCirc_04374
gttgtccaggtgagccaggccatcactaaaggcaccgagcactttcttgccatgagccttcaccttagggttgcccataacagcatcaggagtggacagatccccaaaggactcaaagaacctctgggtccaagggtagaccaccagcagcctaagggtgggaaaatagaccaataggcagagagagtcagtgcctatcagaaacccaagagtcttctctgtctccacatgcccagtttctattggtctccttaaacctgtcttgtaaccttgataccaacctgcccagggcctcaccaccaacttcatccacgttcaccttgccccacagggcagtaacggcagacttctcctcaggagtcagatgcaccatggtgtctgtttgag

SEQ ID NO: 958 - DNA, 155 bp, Homo sapiens
  full length sequence of bloodCirc_11059
ctgaaccttcacctagccccaggattacaaggaaaagcaccaggcaaaccaccatcacatctcattttgcaaagggccctgccaaacggaaacctcaggaagagtctgaaagagccaaatcggatgagtccatcaaggaagaagacaaagaccag

SEQ ID NO: 959 - DNA, 20796 bp, Homo sapiens
  full length sequence of bloodCirc_21189
gtactaactgacttgtccatttgctaagcttcatcccaccgggcaattttcctgcacagcagctgttacagtcccattctcacctggcccctgggccagttcggaagcctctgagcaggtttgtagctttctcctcccttcctgcagagtgcccttaatttagcttcatcagccacttgtcatcattccttttcttgtccaagtttatagtcaagagcaatggctgggaactagagctacccctggaccagcgggtggggtcttcatcagctgggtcccagcatggcttctgacctaccgctgggcacccctgcgagagctgcagaccctcccctagaagacagcagtggtggccttgcgcagcctcagacacacctggcctggtatccccgtgcgtcctccctaccccagagccctgcacccccgtctgtgttcagcccaggctgggttatcccatttcactttggtcattccttcatttgctgatattttttttaagctttagaaaatacttttaagggcgggtgcattggctcacacctgtaatcgcggcacgttgggaagctgacgcaggcagattgcttaagctcaggagttcaagtccagcctgggcaacatggtgaaaccctgtctctaccgaaaatacaaaaaaattagccgggcatggtggtgcacacctgtgctcctagctactcaggaggctgaggtgggaagattgcttgagcccgggaggcggaagttgcaggcagctgagattgtacactgcattccagcttcagtaagagaggaagaccccacctcaaaaagaagaaaaaaaacttgtattttttttcaaatatgtatgaaaggaaagaaagtctaacgtatccgccatagccagtcttatttccttacctgaatattttgaagcaaatcccacatagtgcacgtttatgcagagatacttaagtgtatgtctctgaaagatgaggagtcttttaaaaaactgaatcacagttccatgacccatgataaatggccattccttgatggcaccaaatacagtcacgggttttcccagttgtcttgaaaatgccttttttttttttgagatggagtctcgctctgtcgcccaggctggagtgcagtggcgcgacctcggctcactgcaagctccacctcccaggttcactccattctcctgcctcagccccccatgtagctgggactacaggcacccgccaccacgcccggctaacttttttgtatttttagtagagacggggtttcaccgtgttggccagtatggtctctatctcctgacctcatgatacacccatctcggcctcacaaagtgctggaatgacaggcatgagccaccgcacccggcctaatttttgtatttttagtagagatgaggtttcaccatgttggccaggctggtcttgaactcctgacctcatgatccacccatctctgcctcccaaagtgctgggattacaggcgtgagccaccgcgcccagccaaaaatgcctttttattgttgctgtgtttgaatcggtatttgtatacacataattagccgttaatttcaacatacctaagcattttcgcttatgtaattttcaagttcttgaacatgaactcccagctagatgaaaggtgccactgagcagagaccagcgtggtgcttctaactttccgacagtacacagcacgctgcactcattctgatgagtttgagaatatatctgctccatcgcgtcgtttccctggtgcgcctcaaggtcttgtggcctacagcagcatttcgtactgtgtctgagcctccggggctgctggggctgcatgacccagagggacatctggtcagaggccaacttagcctctcggccaccttggctagggcctttcatgggcctggatgatgggaccactccatgcagctccttcaccctgagggaggggcagctcatccccgggaggcaggagtcccagcagagggcacagcagaagcagctggcacctttgcaagccctgagggatgcggaacagtcatgcctgtgccatttgccaggcaaggcacatggctgatgtggagtctgtggaagaggccgcacagttgcagggtggagggtgaagacacaaggaggcccccagcccagtccgccacagcagcgtggggctggagcaagcccctcttgagggagtctgttaaatccggccccagtggagctcagacacagctgcagcgcggatgagcctcaaggacagcatgccacatgaggggggccaggcacagagggtcacgtgcgtggctccacctctggaaatgtctagaacaggcagagccattgagacagaatgcaggtgcgtgtgccaaggcctgggctttggaggaaacggggtgtgatggcttagcgggcacgtggcttcttttgggggtgacgaaggtgcccaggaattgggtggttgtgttggttacacaacagtgtggatgtgcgaaaggccacctcagtgtgcactggaaaatggctacggtggtaaatttatctgaattttaacaagaagaaaacaacctggccctggatccctcctcccttgcacacttatcatcccagctccgcaaacacagcccggtgtggaggcaccacgcactccgctttgaggtgtgtgtttttggctgacagacttcccgatgagatctgggattccatcgtctgctgagccgggtccacagggccagattagaccccatctttaatctccgccacgccgccgtgggggcctgagtcaacccgcaccatccgaggctcccaccaattctgggctggtctctgaagttggggccagcagcaggcctgcctttcggatagcaaataatagaaagaaatccataattatgtcatataaaagatgcggccagaacactgcacgtggcacggcctgtgatccaaaatgcgtgcaggcatcgtcgttaacttttcttcagtcctctgaggaagtagaataccatttcgatttgttttaaactgtgagctcgtctctcttcaggaaggaaattgatcaaagaagcaaacactcctggatattttgtctgcttgattttcagcaatttactcctaattaattattctgactaggaaaaaaatggtacctctccaggatgccagtgtttagaattgacatttcaaatagctggttggacaaattggagaaattttctgatttctgtcatttgttaaatttgcttttaagtatccctcagggagctgtattcattccaagtgcggggaattaaagttgaatctccatgcaattgaattagcctgagccacagggatgggctgcagaagcctgctgaagcttacagggagattttacttaaagctaaagcttatttcacggagtctgttctgacggttttctaacgccaccgtgatgtacagtttactgttttattaacattggaacagtacttcttttcacaatgtacagtgattgtaatttaagataaatgtgggagtattcttatacctaaggaaatgctgagtcgaaatgctggatttctaaatatatcactggggagaggacagttttttccctttataatgacagtgttgccaacatgaccttatagctatgtaggctggggatattttgatatgcagtaggaaaatgtcacagaagagataacatcaatagaggctaaattttcccttcatgatatttatttttaacatctattctactctgttaaaaaataaggaccctcatgtgttcatgtggaaaacatagtgactagggagagagggatgtgctcattgcgatggatgaagttcttaaaacaaatacatgcaaacgcagtggttcttggaggaatccaagccctgtagaagcttatttttccttcatgtaaatttccagggctgtgtgggcttagctgctctgctccatgcagctattcagggattcaggctgcagggcatcttcaacccaaaggggaaagaccgtggaggaggaggctgtgaggtttctgtgtgctggcccgccgctgacctgcctatcacgtaaacccaccaaagcagggtgccttaacctaggggtagaaaatatttggggggagaaaagcaataaaaaatattctaaaattttaaagtacagtataataactatttacatagtgtttgttttaggtattataagtaatctagagctgatacaaggtagataggaggatgtgttcaggttctaggcaaacaccaagagatgactctagctggcagacacatgctctgttgctccagaaaaagaagcaaccaggctggggcagacagcccagactgccatggttgcggagcaaagggaaaatcagaacctacctggagaccattcaccatatggttcacatccatcagcctagcacttgccaggcatgattctaagccctggggtagaccaggggggcagaaacagagacatttctctttggggtgtgcctagtgcagggagtactggagatgtagtgtgccaggtggcaagcgctgttgaggcgagcacagcggcgggggggtgctggggctgctgggggcatgcaccgtttttaacaagccagtcagcagtctctaaggaggtgacattgaacaaagacctgaaggaggtgagtgggtgagcaaaccgcagggatttgaggaaagagtagacaggaagtgcaaaggccctggggcaggagcgcattgggtgccttgtggccggacagcctcggaacccgtgggaacctggctgtctccaggtgcagatgagatgccactggggaacttgagagtggagggatgacccagtcgcccttcctggtatctctggctgctgtgtggacacagggggccctggtaggcactgtgaagtgatccagctgggagaagatgatggctgtggcctgcacacaaatggtggaggtgaagtggacagatttagacacaattcgaattcgggttttttttttttgagacggagcctcactctgttgcccaggctggtgtgcagtggtgtgatctcggctcactgcaacctccacctccccgtcaatcctacggggtcttggtgacccactcactggggtttgaaggaggcagagcagagagaggggacataggacggacgtggcgccagcagacatggaggcctctttccagaaggatgtaattctcctccgaatgggaaaacagagagcgtgttttggatttttttttttttttgacacggagtttcgctcttgttgcccagactggagtgcagtggtgcaatctcggctcactgcaaccactgcctcccaggttcaagcaattctcctgcctcagcctcccaagtagctgggattacaggcatgcgccaccacgcccggctaattttgtatttgtagtagagatggtgtttctccatgttggtcaggctggtctcgaactcccgacctcaggtgatctgcccgcctcggcttcccaaaatgctgggattacaggcgtgagccaccgcgcccggcctgtgttttggatctgtagaccccatgacgctgactcctccgtgtgctgcaggagtctgaacagaggccacagttaacacaaggctgggaagcagaggcctcgccaagtgcaggagtaattaaaggacacatctttcgagtagacttcatacatgtcccacttttgtgccttacagcttttgttgtttgtaaatgacatctttgtaaaaaataacttttctaatcgttgctcacacataggaatgcattgtggttcagcaagctggctggattctttctggctctaacagtgtgcctgccaaggcgtctcatcttcacagaggctgtcacgtcgtctgcatgtgtctttgtgtccatttgccttttaaatcatgagagggcagggcacagtggctcatgcctgtaatcccagcactttgggaggctgagagatccagatcacttgaggtcaggatttcaagaccagcttggccaacacggtgaaaccccatctctgcgaaaaatacaaaaatcagccaggtgtgatggtgggtgcctgtaatcccagctattctggaggccgaggcaggaggatcgcttgaacccggaaggcagaggttgcagtgagccgagattgcgcccctgtactctagcctggggacagactgagaaccttgtctcggggaaaaacaaacaaaaaaatcgtgagagggtcttgatttccagacaggtgaagagatgtagatcatataagggttgtctgcacatcaggcacctcatttagagagatggctttgagcaccccgggtgagcgtgtgaaatttctcacttaggtgatggcctggaccccataggtagtgtaaattcaaaacgcaaacctgggagtgtcggacctggagctgcaggttttagggggttgggggcattcacaggccctcctgcttttcttctttcagctctgactgctcttgggcaggcttcgtcttcatcatcacaaaagacgttgaacccttggaatccaacagactttgtttcagattccagcacgcgtttttctgctgtggcctgagtggttactttggcttcccccgtctcatgtatgaaacgagccggtgataatcctggtcacaggattttgcgttctggttaagaaaccacagcgacgccaccacataacggacgctcagcgcacatctcttttagatgctggcctgtcagtgggatggcagaaactattcagatgtggtgacgattctgctttggggactgcttcccaagcgggtgcatcctgccggattttaacactgctgggcattgtgagtggtggcaagatgaggaggccaaccctgtagtcactgggctccaggtctgcctgtgagctgcggagggcagggtagagtggcctcagcgtgagcagcaggatgggagcctcgagggagagctgggtttggagaaagtggcctctgttgtcgcgtttctgtcattgagcagattgagcaaaagcagaggcaggaaaacgcatggggaggctggtggtgcgagcccacggtagccatgagtcctgcaaggaggtgtctgggtttgggccctgaaaactttggagaagaggtgggtctgctgtacaattgtcttgtgccatttaaggtaattctgccctgttggggcaggtgtagctccagttttcagaggaggaaacggggttggggagtggcaggcagaggaagcagcaggccagagtcccagagcagatggagagcagccagcacgcgcttcctcctggtggggctcagacagggcttggcaccagggctgtcgggcaagcgggaggaagagctgcggctccggggtgcggtgctgccgcgcagagtggaccggtgatcctacggcaccgtgggcttgtacgcacagggaaatggaggcactcccagaggagctgagtgtcaggcctggcacaggttggagaagagctaggcattctcctggtaaaaccgtaggaaagatggctgcgaagcaggagagatgcaaactctctctgggtagaaatgtcagcagcatttggttttcctcaagtaacggaacgcaaacgtctgcttcctgttgagtcctgctgcctttgccgaagagaattctttttggtgctgtggctttagaacacctggataaagccctggaagttgttctccagcacagaacacgccgtctcggggttcagacatcttcccatacgggtcgtggacgctcttgtgggtgtctgtttcctgaccccgaggtcggcagtggctgagctgctgtgtgggaccccagtccctcttgctgtcctgcctcatctcctcctttctcaccctcctgggttagatcttgtacaatagtaagctcagtgttcgacctggcacctagaaaggagagctgtgcgccctacagcccagcatggggccccgccaagcatctgctggcactggcactggcatctactgtgaggcccctggtgggcagggtcatctcttggtcctcccaggtggcagatgacgcaacagcccggtgatgagtggaacaggcgtgtgcgtttcagcagatgagcaggagatgttgatggattttgctgcctcgctgataaaaatagacatttattcttttcaagacaggcagaaaggctaagatgtgttataaccctgtgggacggaactcagatggcagtttttcatttttgatgtcttttttttttttcttgattccttttctcttaaaattaggcctcagaagctaatcctgtagatcaggctgaagctgacaggagtgaggctgaagctgacaggagtgagcctgagatttctgaatgctcatttatttctccttccatcctcaagattcaggcttgaagccaggaggccatcccccaggaaagggcccctcactcaggcagggaggcctggggcgggggggggggggtgggggggccacccagcccccatcggtgtccgtggctgctgccagaaacggagtcagagaaagtaatgtcagccagacttcaactccagctgggtgtgagcaccttatgccaccgctgcccacgctgccctgcatccgtgctgcgctgcgttggcactggagaggctgggaggctctgggaattggaatccctggctgtgcttgccggaaagggtgtatgtaaatgaggcggttttcctgccacctctgcagatgattcagcccagcaagtgtgaagagggagggaacgtccctgccagagctgggacacagtgcaggggcgtggttataaatgaacgaaacagctcttctgctgagtttttttttcttctatacagttcctctgtgagttccctttaaccatgacgtaaaacccattttgtggctttagtcttctatttcaaacaacatgttcaccagcaacggtgcagaacagtgggacgcactctggggccagggtgcctgtctgcaccttggctggctggcaccctcaggcaggtccccctgggctggtgggcaccaggggagttctcccggacagggttgtgtctcgcaggatgagacagcggtcacgacgacacagcagccatgcgatgacgtgggcccgtcccccaccccggccacttgcctctcccctgctgctccaccgactcctcccagcctgcaggtgacccggacgtgctgcctcacctgtagatgccactttgttcatctgtgagactacgctgggaaaatgggctcactgcagatcttgcattgggtactttttaaatctctctgggcatctgttaaatggcataatgactatctgtgcttacatcttaagcttctattttgcttttttgtttgtttgagatggagttttgctcttgttgcccaggctggagtgcaatggtgccatctcagctcactgcaacctccgcctccagggttcaggtgattatcccatctcagcctcccgagtagctggaattacaggcatgcgccaccgtgcccggctaattttgtatttttagtagagacggggtttcaccatgttggtcaggctggtctcgaactcccgacctcagatggtctacccgccttggcctcccaaaatgctgggattacagggcatgagccaccacacccagccagcttctgttttctttaacttagggatatatcagagaaaaatagaatgatgtatccaatattcatccttctcccagagtttgttcattttttaaaaataatttagttttaaataacaaatataataaacctacttaaaaaatacagaagcacaggccatgtgcagtggctcacgctgtaatcccaacactttgggaggccgaggcaggaggatcgcttgaacccaagagtttgagaccagtctggacaacacaggagggctccatctctataatatgtgtgtatgtgtgtgtgtgtatatatatataatatatatattatataatatatataatttatatatattatatataaaatatatattatataatttatatacataatatatattatataatacataatatatataattatatattatataatatacaattgtatataatataaatataatatatacaattgtatataatataaatataatatatacaattgtatataatataattgtatatacaattgtatataatataattgtatatacaattatatataatatataacatttacatattatataatataatatttatatataattatatatattttatatgccaggctatatatataatatatatagcctggcatataaataatatatatataatatatatatatattatatatatagcctggcatgatggcacacgcctgtagtcccagctatttgggaggctgggacaggaggatcacttgagccctatgatcgcaccactgcacttcagcttcggcaacagagtgagattctgtctcataagataaaataataaataaaataagatataaaacgaataaatagaagcatagagaagagtggaaagactatagcttgaccactcaggaataatcacgataaatattttgttttataattcttccttaagttttccctttcataccccaaatgtgtatgtgtgcataatataggacagatgggattgcatcaaacaccattctgaagctttttcccacttacaagtacatggagctcttgccgtgtgatcaatggagaagcagtgtcactgaactgtcctcacagttcatttaacccattttctcctgatggacctttcagtccttctcagtcttttcgtgtgtagacgcctgggtatttccttaggacaaatgcctaggtgttgagttaccagatcaaaaggcttgtaattttaaaagccttctgaaacaagcttgaaatctccccacatggatgggagtggccattttttctcatgcactatccagtcatatccctcaccatttcctgttggagtttttgatttcattagtttatataaactctgtatatgtacgtttatacctttaggtttgtgtatttatgatgtcataaaaatttcccagtttgtcatgcaattagagaaatacacacacacacacacacacacacacacagtttttttctttccgtcgagacgggttctcactgtgtcagccaggctggagggcagaggtgtgatctcggatcactgcagccttgacctccccaggctcaagtgatcctcccatctcagcacccccgagtagctgggactacagaggcatgccaccatgactggctaattttctatttatttttattttttatttttttttgtacagatgggattttgccatgtttcccaggctagtctcgaacttgtggcctcaagtgatccacctgccccggcctcccaaagtgctgagattacaggtgttagacaccacacccagccaaaaatcatccttttgcaacctctttttggttctaagaaagagggccgggcacggtggctcatgcctgtaatcccagaaagagcattcccaccccaaaactataaaaggttattaaattttaaaatatttctgtggatatttttgttccatttaaaaatactatctatttacagtttctatttgaaatttattttgtaataggatgtgagagggagctcaccttatttttttccttcaaatattcagaaaattgttccgactgagttatttctctcctgtccccttaactggcaagccccctccagccaacccgagtgctgccagtggcttgcctgcccattcagggagatggtgatggttttcctccctgccctcttctgaagacgagcgccctgagagcaggagtaggaggtgctcaggcagtgtagggtgagtggcatcgtgcgttgaggtagagtttaggaaacccttagtgcagggcttggcaccggcagacctcactggtgggcaggtattcctgtgctcgcagatggaactgagtgaacctggtgaggatggattgtcacgcatttggttcctccagctccttttgtttgatttaagcatagttgttatcgattcaaggcagcgtggcttggtggcaaggcttgtgtgctctggtagccgtgagtgctgtgtgtgaatcccagctctgcctgtcagacacctcggaccacatctgtaggatggggatcctgcctgccttgcccgtggtaaggattaaaggagctgatttgcctgaaggggtctgcattgtacctgacacaatggtggtggccattgcttcttcaattatgggaacttatgttaaaaagggaagtaaacattttatgtaaatattgagaaaagtactaggtatctaggatgaatcagttactgtaaaagggcacaaagtttttttttttttttttttttaactttcctagctgcttagcacagatacgaggcatgagggtggcagatcagtgtatgtcggccgggcacagtggctcacacctgtaatcccagcactttgggaggccgaggcgggtggatcacctgaggtcaggagtttgagaccagcctggccaacatggtgaaaccccgtccctactaaaaatacaagcattagctgggtatggtgatgcacgcctgtaatcccagctactcgggaggctgaggtgggagaatcacttgaacccaggaggcagaggttgcagtgagctgagatcacgccactgcactccagcctgggcggcagcgagactccatctcaaaaaaaaagttttggtctatttttattgatacgtaataggtgtatatattttcagggaacatacatgtgttaggtaggtcagattcttgtatgttttgggtgaaaaaaggattcagtttggagaacaagactctttctgaagtacaagagatgtcacatggaccctcatcagggcggtcagctgatttgatggctgatgttggtggaggggcaaactggaaatcacagtcctagccctgtggtctgctgcccaggtgccctggctgtcacctcaccccatggagctcctggctcctcagctgtgcaatgaagacaagtccaagagcgaggacatgagaagagacaagaatgtgctggaagtcttgtactggagtaatgttgatgctggagaaatgttggcttcttagttgaaacaggctgggtgctgtggtgcatgcctggaatctcagcactttgggaggccaaggcaggaggatcacttgaggccaggagtttgagaccagcctgggtgacatagcaagacccctgtctctactaaaaaggataaaatataaaataaacaaacaaacagtaaagactatttgtaaaaggtagagtaatagccttcctatggataccttatggttttgtcctaaaaacacttgggattgagtcataaacccataaggcatttttactaagagttggtgtaacaagaagatattcttttattcatctgtgtattcattcagtcaacagttgcacaaaaacagacacagtccttgctatattgcagtgcctacattctagtgggagaggcagatacagagtcggaatcacaaaagaaatctagagttgaaaccagaaaaggctgtagagaagagtcagagaaatgtacgcataaggcattcttcatgtctccactgagaggtgtcaggcttcgagcagccctggaccagcgtgcgggtctgtcttggtagggccggtggttgagatgctgtggtctcatcagttgccccgattggggaatgtttctgtaggagataacttacattttaccagtattcctttaattcctctttgtctttattatagtattttttttttttttgagacagagttttgctcttgttgctcaggcaggagtacaagggtgcgatctcagttcactgcaaccttcacctcccgggttcaagtgattctcctgcctcagcctcccaaatagctgggactgcaggtgcctgccaccatgcctggctaatttttgtatttttagtagagatgaggtttcaccatgttggtcaggttggccttgaactcctgacctcaggtgatccacctgcctcagcctcccaaagtgctgagattacaggcttgagccactgtgcctggccttattacagtatttctaatattgttcagtaaagacagatggtggatcaaagaggatgtttttgacttgtgaggaaaaatgtattcataatttatggggaaaagttttcttcgtaaagatcacaggggtggctttcaggaccatttctcaaagagataatggtggttgcagtttcaggttgaaccacaaacatttattttaaaaaaccccaacaggaaattccgtgttgatggttagtcatctgcgggagcttaggtgtttgtttatagtcagtcctagactgtacgggtgtgtcatgctcttcctgtgcacgctgtattgctcactaaaataaggttaacatattttcaggctattactcattaaaccaaaagaggggagcaagtggtttagggatgatcatcagtctgatctggaggcgcaggctgcctgtgtcggcctcagcgcagcgttccagtcttccctgggggagttctccctgctgtccttgcccagcaccttctacagcccctgcctttggggtgactgctcccctgctcacgttgcctcccatggcccattcttttggtgttgccaagaaccaggctgagacaggttggaaatgctccaataatttctactcagggagaacagaaacgaaagccttccaggaaccgcgcctgcagaacacagaagtgctcaacagaagtgcgaagatgctgctgaggacagctccgctgcccccgctgtgaggactgcccccacccggggctgcacccagagctgcacccagagcttccttccctccttcattccgacccagccttcccatgggcccaagggagtgaaggcaaaagctccttctcagcgtgtggatgcagccagggagcagtggtggatggctacatcctgtgtccccatgcccacaggaggaggggtaggggccatttcctaagctgggacccatgaggtcctgaggctgcagcaggatctgtccccagggcaaaggggccctagggctctggttgatggccagcattccccagaacgtattctctgagcctgtgcaccagctccccgttgccacactgagacccccttggtggcatcagctggctcctgagacgatgcccctggttccgaggagcactgatgcagtggctcctgctcagggctggagggtgcactcttccttcctgatgcagagctctggctagaggcaggagcagcctcccctgtggaggtgggtgaccggtggccagcgaggtgggttctgttgactcccttccaccgtggggcatgtttgtgcctccgcttcctcggcgtctgttttcggacaggttttgtggccagaaacctgggacccccatctgtgcctctgcttccttggtatccgtatttggatgggttctgtggccagggacctgggacccccatctgtgcctccgcttcctcggcgtccgtgtttgggcagcttctgtggccagggacctgggacccccaaagtgcgagggttccttttcctccccgtcttgtcacatttgacttttggtgtgtcctcacagatctggggggctccagagcccctgtcgaggtcagtttgccccagtttgggagtcagaccggggggagggggtagaacgcatcagctggggacccagctccagccatccctgcacagctgtgacgcctgggccagacgcgtctctgtgaacgtgggctgggtgaggctttgacttcggctcaccgtgggctcattggtggcccgggcctggcatgggagacagcatacagttgtctgcactccggctgacaggagcagatgttccgactgcattcccagcacacattctgagaccgtctctgtccatttcaccaaaaaagctgccatgactgtgtttagcgtcaacttgggtggccataagggaggcttgcttgtgtagacaacaggtgagttgtcaccctcgtgtcctgattttagcaggagagtacagcttgatagcatctactctctggtctgtactcactgagccatcactccgtcctgttctgcggctcgtgctgatggcacggatctcggtggctgctgtgccattgcctggccagggcatcctgtcctggcatcacagagaccatatctgcacctggcttggcccagggtatggcacagaagtgtttagcagccctgagctatccttctcactttctttggcctgcacgttttctggctgatgcccagtgtaatgaatgcagagttctaggaggaccatcgggaagcatggctttgaataatgactcactttggagctctggaaacagctttgcatgtcatttgggtggcagatgtttaaccgtttacatcccctgattcatgggtgctgagcactgggccggcttcctaggagacagccctgggcccctgtgccagcctcacagcgaggctgccacccaagctcaggtggcagctgcgcagcctatgggtgctgacccgggcctgtggttcacccgccggtagccaaagcggcttcacggaagagctgggctattcatttatttaatgactctgaatttctgcagctgctctccccgcctcagggtacacgtctgcggggaatcctggcaggcctgcactttattcttcatgcaccaactttcccccatccctgtcccttacttagatggccctcagggcaggtggcacagagtctgctccacatccctccctgaaaagtcggggaggagccaactccgaaaggagtttcttcaggggaccgcctgctcctgcaggaggctcgcctgccgcccacctctgctgacgtccgctgtgtatactgaaattttttgttccctgtgacccagttgctcacacaggaagccgattactcattcactatttttccctttcactgtgtgagatgcggctctaaaaatggaatcttaaacaaatgtgctgagtgatgccgattcagtgaacacggcacggctgtgtacatgacgctgcgctgggttccgggccttgccctccgaactcgctctctaaggaatgggtatggccttaagtgcagagggcccgccagccctgggccccggggagccatcgcccctcccaggagcagctgaggtcccttccaaccacaggtacaccttactttattgccctgcacaaagaatgtatgcttttttccttccttccttccctccctccctcctttcctccttccttcccttcctcctttcctccctccctccctccctccctctctccctgcctcccttctttactccctccctccttccctcacaaatggaatgtttgtagtagcctgaggaactcttttggcgccattcttccagtaacatgtgctcacttagtgtctctgtcagcattttttaagcaataaagtatttttaaattaagatatgtacattatttacacactgctattacacacttggtagactacagtatagtgcaaacaacttttgtatgcactgggacaccaaagcattggtgtgacctgctttattgtggcaatctggaaccgagcctgcagtgtgactgaggtgcgctgtgctagaatcctgggattcctgaatgaaaggatttgcctttctgttcccaaaggtttcaaccttcaatgcagagacaagactaacacttatggaagcaactgaaagcccatttaaagcccatttaaaataagactgggtaggacatgtggcagggcgtgccacctgtggcctggggaggaggtgcccatggggtgtctggagagagcgtccacggagaggtggaacctcgattactccttggagcatccttggaggatggaggagatgggggaggatggctgcttccagtgggcctggaagtagtggggaggtgaggtcgagtcttggatgcaggccagggatttgggactcggctgttggacaggcagtgggagccaggacctgctccgtgaatgccagtgtggtggcatcttcttggtgaaggcatcccagatgtctcctccttgtgggctttcgtttctttaacagagagcacatggagagcgcatccctaggtggtgttagaattcccttttggaaccatccgtgtcaaatgtgacaagtgcgtatgtggcccatccgtgtcttgtggcctcttgtacatgtggtccacaccttggtgcattattcacctgtcggggccaggggctcacagcccagggtgggcatccagtgcccttcttgtcatccccatcttcctcgtgcatgggggttgtgtctgcacacttctgctctgtctcctcttgcacgctttggctttgatcctccagcttgtatctgcagcttacacgtgggactccctgtgagtgatcagagtggatttcaggcaccccaaggtctaaggcctgcagaggcgtccttggcagtggagttgccttcctgaaggtacgggaaggtggaccttccctggcccctctgcctggaaaacttttacatctttaacttgtaattttatattccacgtgccttcacgtgaagtatcagtattttcattattgaaagctagaagcaagaaagaactatcttaggaaattgcatgttttatgaattaccgctgtgttttcccattgcctttattcacaggggttagtaccaggctgcgtgcaggtttcccgcctcccatgccaggtgttgcagaggaggtagtctcggggaaggcttcttaggagaaatagggtcagcctgagccctgggctcgagctgcgtctgtgcctggactctgcttgggggcccggtggaggggcctggtttggagccggcccagcagctttgcttcacctgcaagtagctcgtgttccagcccaaaaccttcttgcagccagcggtgtgcccctttgtggtatggttgtgaggctcggttaagtaactgcatgagcaccttgtaagctgggagtcaccgaaggacagtgactctcctccccgagaggagcgtgcccgaccctgaaatcgagattggccacagggccagattcccgggctctgtcctagacgtttcctgggagccgtctcactgggtggttggagccacctgagaacagggccacgtgttggcaagtgctttgttctactccggtgtggcgtagagagaagctcagtcggtcctcaggggagtggctgtctccactgaacccacctggactgtgatgtccactccctgtcacggtcagggtccttgctgggaaggatcttggtgagctgctgagcttatgaaaagtcatcagacgtcatcctgtggatgactgacacctggaaactgtccctggtggcagcatgggtgctgcttgaggactcagtttgtttgtttgttttgtttatttatttagagatggagtctcgctctgtcacccaggctggagtgcagtggcatgatctcggctcactgcaacctccgcgttcaagcggttctcctgcctcagcctcctgagtagctgggactacaggcacgtgccaccacatccagataatttttgtatttttagtagagatagggtttcaccatgttggccaggctggtctcaaactcctgacctcaggtaatctacccgcctcagcctcccaaagtgctgggattataggtgtgagccactgcacccagcctgactttatttttgtagccttggcccagggcatggtgcccagcccacaggggcacccgctgagtgccattgaagggtggagtgtcatggaagtctgtagatgtgtcatctatgaagtcatggcgacttggtggaaggccatgctgccataaccatttccaaatggtgtaactcagtgagtttaataaccttgaaagcatgttagttttctcataggaaacaaacaaacaaaaaagcaaataattcaaggagtctctgagtttttctaggtcagaaatacagtaagaacagctcatattatttttagtagagttctttttctttccagtgaatgtcaatagggattgaagtacatgtgattttttttaaatggagaagggttgtcttttttttaaacagacatttgagtgaaaattgaaagcgttctattattgaaaaatgtttatttttctaaatctacattttgaactttactaatatggagccactgaaaacttgagttgggatgaagtttctgccgcttatgcatagtaaaaagcgcttcctgagtaaacgagcggtttaagcagcagcaagggaggggcaccgccttgacacttttgggctctttgccttgtctcccgtgctagtaattcatgctgcctcatctctccagtgtctgagacaggaagaaagaacaggaatggacatagcaagtttgatcaccaatgagttgttatgatacattttaagtacattattggcttgacgttgagacgcctcctctgtggaatgcaatattggcctggacgtgaatggaaacagcagaggggggcatatagtggcttggggccgcgggatgggaagggccgcagagcaagcctgctcccccgttaatgggtgttctctctgccattccagcacttgcacctcctgcgccgccgccccccatccaaggatatgccttcaagcctccacctagacccgactttgggacctccgggagaacaatcaaattacaggccaatttcttcgaaatggacatccccaaaattgacatctatcattatgaattggatatcaagccagagaagtgcccgaggagagttaacag

SEQ ID NO: 960 - DNA, 192 bp, Homo sapiens
  full length sequence of bloodCirc_20250
attataacaatgaaatggaagttgaaggccctgaagatcaaatggtattctcagagcaggcagctaataaagatgtcaacggtcaggagtccactcctggaattgttccagatgcggttcaagtccacactgaagagcaacagaagagtcatccctcagaaagtcttgacacagatagtcttcttattgctg

SEQ ID NO: 961 - DNA, 710 bp, Homo sapiens
  full length sequence of bloodCirc_20208
cttttcatgcaacacccaacacttataagcggaagaacacagaaacagctctagacaacaaaccttgtggaccacagtgttaccagcatttggtaagacttagtgcctaattattgcagagggtacttgagaggactttgcactttggtggaggtgatcaagtcagcgttaatgttgtctgcacccatgctgttatgggccatatgatagacagagctttctcacccatgctgtttcttccatagctcatgtactgcacattttagtccttcattaatgtggtattattctttttaaaatctgtgttatctcttcagcaacatttcaaggtctttaggatcaaggacttttatgccttccacaaagtctatgagagttgcaaggcacagatagtccgcttagaaagcaggcatgcagtaatcatacgcagtagatcccaagcccctctcatagccatatccctctacttgagttttagatgcactgtcatttcagctatgtgataggttccacagattttttttttttaaatgatggagaacaggtaaggggttaggaaaatatgaggtagaaaagttgtttttacgggtactctcttatttttaccatttcccctctttgaaccaagccactcctacctaggaactaaatgggtatatattgcctgttggattttggacagaagattcattgaatggcacctgcagaag

SEQ ID NO: 962 - DNA, 173 bp, Homo sapiens
  full length sequence of bloodCirc_02272
gattttaaaatacccagtaatacaacattaaaaactcctctggttgccgtatttgatgatctggatatagaagcggatgaagaagatgaacttagggccagaggtcttacaggtttgaaaaatattggaaatacttgttacatgaatgcagctttgcaggctctttctaattg

SEQ ID NO: 963 - DNA, 249 bp, Homo sapiens
  full length sequence of bloodCirc_00711
atctcacattcttgaaggtggcattgaagagcactaagatcggaagatgagtgagcttgaccagttacggcaggaggccgagcaacttaagaaccagattcgagacgccaggaaagcatgtgcagatgcaactctctctcagatcacaaacaacatcgacccagtgggaagaatccaaatgcgcacgaggaggacactgcgggggcacctggccaagatctacgccatgcactggggcacagactccag

SEQ ID NO: 964 - DNA, 516 bp, Homo sapiens
  full length sequence of bloodCirc_19568
gagaatattaaacgtaaagaccatattgattatcagaaggataaagttgctttaactctggctcgtctagcccgccatgttgaagtggagaaacagcagaaagaagagaagaatagagcattcagagaaaaaattgattttcagcatgctcatgggttacaagaattggaatttattcgaggacattctgatacagaagcagcaagactgtgtgtggaccagtggctaaaaatgccaggactcaaaacaggcacaattaattgtggaacaaaaagttcattccgaagaggaggccacacgtgggtgtctgggaaaccaattttatgtcctataatgcactgtaacaaggagtttgacaatgggcaccttctcttaggacatttgaaaaggttcgatcactctccatgtgatccaacaattacactacatggacctttcttcagctcctttgcttgtgtagtatgttataaaaaatttgttactcaacaacaatatagagatcacctttttgataag

SEQ ID NO: 965 - DNA, 282 bp, Homo sapiens
  full length sequence of bloodCirc_01141
ctcccaatatggaacatgtactagcagttgccaatgaagaaggctttgttcgattgtataacacagaatcacaaagtttcagaaagaagtgcttcaaagaatggatggctcactggaatgccgtctttgacctggcctgggttcctggtgaacttaaacttgttacagcagcaggtgatcaaacagccaaattttgggacgtaaaagctggtgagctgattggaacatgcaaaggtcatcaatgcagcctcaagtcagttgccttttctaagtttgagaaag

SEQ ID NO: 966 - DNA, 202 bp, Homo sapiens
  full length sequence of bloodCirc_02693
gtggatggagagagaaagaaaaagccagagaggagagctggggtccacctcgagaatcaaggccatcagaagaacgtgaatgggacagagaaaaagaaagggacagagataatcaagatcgggaggagaatgacaaggaccctgagagagaaagggacagagagagagatgtggatcgagaggatcgcttcagaagacctag

SEQ ID NO: 967 - DNA, 223 bp, Homo sapiens
  full length sequence of bloodCirc_14089
caccagcagacgtttttgaatcaactgagagaaattacggggattaatgacacccagatactacagcaagccttgaaggatagtaatggaaacttggaattagcagtggctttccttactgcgaagaatgctaagacccctcagcaggaggagacaacttactaccaaacagcacttcctggcaatgatagatacatcagtgtgggaagccaagcagatacaa

SEQ ID NO: 968 - DNA, 413 bp, Homo sapiens
  full length sequence of bloodCirc_08653
gaaaaggaccagggaaaaggagaggtccaacaatcaagatatccggagttcaggttaatgtgaaatccattatccaacatgaagaggagtttgagatgctgcataaatctatccctgtggaccctgaagaaaaaaaaaaatactgcttaacctgtcgtgtcaaagctgcacattttgatgtagagtggggggtggaagatgattctcgcctgttgctggggatttatgaacatggctatggaaactgggagttaattaaaacagacccagagcttaaattaactgacaaaattctgccggtggagacagataaaaagcctcaggggaagcagctacagacccgagcggattacttgttgaagctgctcagaaagggtctggagaagaagggggctgtgacaggtggggaagag

SEQ ID NO: 969 - DNA, 185 bp, Homo sapiens
  full length sequence of bloodCirc_04712
attcttctgtgtgactcttgcgatagtggataccatactgcctgccttcgccctcctctgatgatcatcccagatggagaatggttctgcccaccttgccaacataaactgctctgtgaaaaattagaggaacagttgcaggatttggatgttgccttaaagaagaaagagcgtgccgaacgaag

SEQ ID NO: 970 - DNA, 277 bp, Homo sapiens
  full length sequence of bloodCirc_06433
gaagaaaaactaaaccaccacgaccagattccccagccactacgccaaatatatctgtgaagaagaaaaacaaagatggaaagggaaacacaatttatctttgggagtttttactggcactgctccaggacaaggctacttgtcctaaatacatcaagtggacccagcgagagaaaggcatttttaaattggtggattctaaagcagtgtccaggttgtgggggaagcacaaaaacaaacctgatatgaattatgagaccatgggaagagcactcag

SEQ ID NO: 971 - DNA, 164 bp, Homo sapiens
  full length sequence of bloodCirc_04231
gtacaactggatttggaacaaatccaggtggtctctttggccaacagaatcagcagactaccagcctcttcagcaaaccatttggccaggctacaaccacccagaacactggcttttcctttggtaataccagcaccataggacagccaagcaccaacaccatg

SEQ ID NO: 972 - DNA, 292 bp, Homo sapiens
  full length sequence of bloodCirc_15257
ttatgagttgcagaaacgaattgctgaaatggaaactcaaaaggaaaaaattcatgaagataccaaagaaattaatgagaagagcaatatactatcaaatgaaatgaaagctaagaataaagatgtaaaagatacagaaaagaaactgaataaaattacaaaatttattgaggagaataaagaaaaatttacacagctagatttggaagatgttcaagttagagaaaagttaaaacatgccacgagtaaagccaaaaaactggagaaacaacttcaaaaagataaagaaaag

SEQ ID NO: 973 - DNA, 874 bp, Homo sapiens
  full length sequence of bloodCirc_08264
caatgatgttgtccactgggcatgtactgaccaatgtggcaggtctgagaacatagctgaagctgaaaataggaaagctgggggcaaggaagagccttgaatcttgaggtgggacgttgactctaagatgtccttgagcagtggagcctccggagggaaaggagtggatgcaaacccggttgagacatacgacagtggggatgaatgggacattggagtagggaatctcatcattgacctggacgccgatctggaaaaggaccagcagaaactggaaatgtcaggctcaaaggaggtggggataccggctcccaatgctgtggccacactaccagacaacatcaagtttgtgaccccagtgccaggtcctcaagggaaggaaggcaaatcaaaatccaaaaggagtaagagtggcaaagacactagcaaacccactccagggacttccctgttcactccaagtgagggggcagctagcaagaaagaggtgcaggggcgctcaggagatggtgccaatgctggaggcctggttgctgctattgctcccaagggctcagagaaggcggctaaggcatcccgcagtgtagccggttccaaaaaggagaaggagaacagctcatctaagagcaagaaggagagaagcgaaggagtggggacttgttcagaaaaggatcctggggtcctccagccagttcccttgggaggacggggtggtcagtatgatggaagtgcaggggtggatacaggagctgtggagccacttgggagtatagctattgagcctggggcagcgctcaatcctttgggaactaaaccggagccagaggaaggggagaatgagtgtcgcctgctaaagaaagtcaagtctgaaaag

SEQ ID NO: 974 - DNA, 303 bp, Homo sapiens
  full length sequence of bloodCirc_19854
aaagcactccaaagacctccgccagctgcagccctgcccctgagtccccgatgagttccagtgagtcggtgaagagcctgaccgagctggtccagcagccctgtccccccatcgaggcgagcaaggacagcaagccaccagagcccagtgacccgccagcatccgactcccagcccacaaccccgctgcctctctccggacactcggccctcagcatccaagaattagtagccatgtccccggagctggacacctacggcataaccaagcgggtgaaggaggtgctgacggacaacaacctcg

SEQ ID NO: 975 - DNA, 297 bp, Homo sapiens
  full length sequence of bloodCirc_17166
gaaatctcattggaattggaagcagcagtgcaagaaaaagaagaaatgaagagcagagttcataaatacataacagaggtgtcacgatgggagagcttaatggctgccaaggaaaaagaaaatcaagatttgttagatagatttcagatgcttcataaccgtgctgaagactgggaggtcaaagcccatcaagctgagggagaaagcagctcagttcgactggaacttctttctattgacactgagaggagacatcttcgagaaagagtggagctattagaaaaagaaattcaagag

SEQ ID NO: 976 - DNA, 165 bp, Homo sapiens
  full length sequence of bloodCirc_04708
aaaagaacgcttggtgtatgttggtatcagtattgaaaacatcattcctccacaagagccagacttttctgaagatcaagaagaaaagaaaaaagattcaaaaaaatccaaagcaaacttgcttgaaaggaggtcaacaagaacaaggaaatgtataagctacag

SEQ ID NO: 977 - DNA, 684 bp, Homo sapiens
  full length sequence of bloodCirc_06000
attttcacccgatggaagactaattgtgtcatgtagtgaggataaaactattaaaatttgggataccacaaataagcaatgtgttaataacttctcagattccgttggatttgcaaattttgtggactttaaccctagtggtacatgcatagcttcagcaggttctgatcaaactgtgaaagtctgggatgtaagagtgaacaaattactacagcattaccaagttcacagcggtggagttaattgcatatcattccatccttcgggtaactatctcatcacagcttcttcagatggtacccttaagattctggacctcttagaaggaaggctcatctatacacttcaaggacatacgggacctgtctttactgtttcattttcaaaaggtggagagctatttgcatcaggaggtgcagacacacaggtcttattatggaggactaactttgatgaattgcattgtaaaggtcttaccaaaagaaatctcaaaagattacattttgattcaccaccacatcttcttgatatctacccaagaacaccacatccccatgaggaaaaagttgagactgtagaagatttttttcttcatcttttgagattaatccaaagcttgaggtaatcgatttgcagatctctactccccctgttatggatatcctttcttttgattctaccaca

SEQ ID NO: 978 - DNA, 137 bp, Homo sapiens
  full length sequence of bloodCirc_19065
aaaatggaatcatcaagacagataaagtatttgaagtgatgctggctacagaccgctcccactatgcaaaatgtaacccatacatggattctccacaatcaataggtttccaagcaacaatcagtgctccacacatg

SEQ ID NO: 979 - DNA, 429 bp, Homo sapiens
  full length sequence of bloodCirc_01612
attgtgaaaactgctgagagagacttgcaatccagtcacataagtataataaagaaatattggtcctcatggaagaagagcaagatttaccagagcaaccagtgaaaaaagccaagatgcaggaatcaggagagcaaactataagtcaagtaagcaatccagatgtcagtgatcagaagcctgaaacatcaagccttgcttcaaaccttcccatgtcagaggaaattatgacatgcaccgattacatccctcgctcatccaatgattatacctcacaaatgtattctgcaaaaccttatgcacatattctctcagttcctgtttcggaaactgcttaccctggacagactcaataccagacactacagcagactcaaccctatgctgtctaccctcaggcaacccaaacgtatggactacctccttttg

SEQ ID NO: 980 - DNA, 156 bp, Homo sapiens
  full length sequence of bloodCirc_07213
gagatgatttttctttgattcaacaagaaatatttatggttaaagaatgtaaacattgtaacatcgttgcctactttgggagttatcttagtcgggaaaaactatggatttgtatggaatactgtggtggcggatcacttcaagatatttaccatg

SEQ ID NO: 981 - DNA, 228 bp, Homo sapiens
  full length sequence of bloodCirc_02010
tggtattcatgggtagtttgaaatatccagatgagaatggatttgatgccttcctgaagaagcatgggggtagtgataatgcctcaactgattgtgaacgcactgtctttcagtttgatgtccagaggaagtacttcaaggaagctcttgatagatgggcgcagttcttcatccacccactaatgatcagagatgcaattgaccgtgaagttgaagctgttgatagtg

SEQ ID NO: 982 - DNA, 779 bp, Homo sapiens
  full length sequence of bloodCirc_10749
gtatgtgatagtggaatgtgaagatcaagatactcagcagagagatccaaagacccatgagatgtacttgaacgtaatgagaagattcagccaagcattgttgaagggtgataagtctgtcagagttatgcgttctttgctggctgcacaacagacatttgtagatcggttggtgcatctaatgaaggcagtacaacgcgaaagtggaaatcgtaagaaaaagaatgagagactacaggcattgcttggagataatgaaaagatgaatttgtcagatgtggaacttatcccgttgcctttagaaccccaagtgaaaattagaggaataattccggaaacagctacactgtttaaaagtgcccttatgcctgcacagttgttttttaagacggaagatggaggcaaatatccagttatatttaagcatggagatgatttacgtcaagatcaacttattcttcaaatcatttcactcatggacaagctgttacggaaagaaaatctggacttgaaattgacaccttataaggtgttagccaccagtacaaaacatggcttcatgcagtttatccagtcagttcctgtggctgaagttcttgatacagagggaagcattcagaacttttttagaaaatatgcaccaagtgagaatgggccaaatgggattagtgctgaggtcatggacacttacgttaaaagctgtgctggatattgcgtgatcacctatatacttggagttggagacaggcacctggataaccttttgctaacaaaaacag

SEQ ID NO: 983 - DNA, 210 bp, Homo sapiens
  full length sequence of bloodCirc_12347
aaatctatcaaatgtggaagaaattgggacttgctcgtacattaattatgtcatcaccatgacaacactctatattcagcaattaaaaagcaaaaaaaaagagaaggaaatggcagatcagacatgtattgaagaatttgtgatccacgcattggcattttgtgaaagcttatatgatccatatcggaattggagacatagaatttcagg

SEQ ID NO: 984 - DNA, 856 bp, Homo sapiens
  full length sequence of bloodCirc_10987
agtaaagacaagattgcatcctacagcaaaactccaaaaattgaacgaagtgatgtgagcaaggagatgaaagagaaatcatccatgaaacgtaaacttccttttactattagcccatcaagaaatgaagaacgagattcagacacagattcagatccaggacatacaagtgaaaattggggggagagacttatatcttcttacaggacatactcagagaaagaaggtccagaaaagaagaagacaaaaaaggaagctggaaataagaaatccacaccagttagcattctttttggttatccactctctgagcgaaaacagatggcacttcttatgcagatgacagcaagagacaacagtccagattccacaccaaatcatccatcacaaacaacgcctgcccaaaagaaaactcccagttcttcatctcgacagaaagataaagttaataaaagaaatgaacgtggtgaaactcctttacacatggctgctattcgaggagatgtgaaacaagttaaagaattaataagtttaggggcaaatgtgaatgtgaaagattttgcaggttggacaccactgcatgaagcttgcaatgttggatattacgatgttgctaagatacttatagcagctggagcagatgttaacacacaaggattagatgatgacactccactccatgattctgctagtagtgggcacagagatatagtaaagctgttacttcgtcacggtggaaatccatttcaagctaataaacatggggagcgtccagtggatgtagcagaaacagaggagttggagttgctactaaaaagagaggtgcctttatctgatgatgatgaaagttacacag

SEQ ID NO: 985 - DNA, 360 bp, Homo sapiens
  full length sequence of bloodCirc_01864
ttgtgattccaaagaatccctatcctgcctccgatgtgaatactgagaagcccagcatccacagcagcaccaaaactgtcttggaacatcaaccagggcagagggggcgtaaaccaggaaagaagcggggccggacacccaagaccctaatttcccatcccatctctgccccatccaagacagctgaacctttgaaattcccaaagaagagaggtcccaaacctggcagcaagaggaaacctcggactttgctgaacccaccacctgcctcaccaacaaccagcactcctgaaccggataccagcactgtaccccaggatgctgccaccatccccagctcagccatgcaggccccaacag

SEQ ID NO: 986 - DNA, 14956 bp, Homo sapiens
  full length sequence of bloodCirc_20724
agtgaagagagaacctgacagccataggaggaggaaggtttgcctcactttaagtccggatgtggttaaagcatgggagtgggagaagagaagggatttgactgagacaagttgatttgagtgaagccgctactcttagacaactttgcgtaaaacagctggttagttaatatgtttctcttttattccatgctagtcctccaagccttaaaacaacttattagagattagaatttttaaaatctgttttgcaataaggcacgtgtccagttgaattctaatttcactaaacctgccccctagaaaactgctgaacttatttgaaaacactgagtcatgatgatataaatatatgatggggatttaatgaagtaggtctaatttcaagaatatctaatttatgaaaccaagcagtactgtggaatttgttggtaattagaaatacaggtttaaagtatataaaccatatatgattttcataactttaaaggagtaaatgtttttactctttaaccagtcttgatattagtgattccttctttacaaactgaaatgactccagattttttgaaacagtactgttgtttttagaggaattaaaaaatatattgcaagtttgctgccatgtgtttctagtatagtactgctttgaaaatataggtgtttaaaattaatcaaatacatattagcaacctttaaaatacagcattgaatacaatatgataaataaaattactttatcaaaactcctttggagtctcagccaacttttatatttcatgttatttacctcaaactccattgtaactatgcagaacccagtaaaatctcttttctttctcctttctcccatattgtcttgtctacagaataccagagacctatcagttttcctaatgcagcttcaaaggcactattgactccttgccctgtttcttctacccttgcaaacttctgggaagtatttccaagtatcttatagctgagctaccctgtccttattgtagaaatcccatccaaatttcacattagggttatgattgtagatctctccttaagccttttgttcagcttctgcctttcacccaggtcaaagtgctattaataagcttatttcctattaccaaagtgtatcatcttaaatttccttcacctaacctatagcttcatcagaaacttaaatttttctgagactattgccaccctctcttgatcataccatgtttgccgcaatgcaccagtcgggaaacagccgtttagtcagagcctacttggtgccagtcactttaccagatgctgagaatactgtggcaaataaacacattattgtcctcatggaactgatagtctggtgggaacaacaactattaaacaaggtagtgcgtgtaattaagtgattgcatatgtgtgaagtggtttggagaagaaggagaacgtatgacttgtaaagcagacatgcgttttattggggtagtcttgaggtagttgtgttgaagctgaagcatgaagattgagtacatattgttagctggttgaaatctgggttggggaatattttaggctaagagtggtcccttctctatcatcacattttactctgtaatcaagcaggttctcatactatttattctcatactatttagccgtgccacttgctcactgtcacccagtgcttcttctttcttaatgagctcttgcttttatacctttctatatttctgattttatagtatcatcctattttggaattcctgaggtcagagttttcaagctgttagattaggatctaccagtagcaggctctcagtgtctgatttgtccactgcttcctacctggtgactctccttttccttctctcaactcctcagattttctgtgatttctgcaggaagcaaagccagcagtcaggtaaaggggttggggagttggtgggggtggggacttagaatatttgttgatatcaaacctctccccaccaaacacttgaatttcattttcagcaacctcttcttcccattctagtgacatcaagacttaagaagattgaaaaatgtcccatcttcagaggaaatctaggtattttgctctagatcattaaaggttacacatattcgccctgaaattctccataatctgtaactgtgcttcatctgttgcctaatactttatattttaaatttcttcatttacttaaaaatttctatttttgtaactagcagtttacatttttttagagtcaagcatattgatatgcagtatcactaacattgtcagtactggtgatatacatacaagcaaacttgcagatatatatcaacaaaaacaacattattgtactagtacaaagtggtcaaagtgtgttcctctgacactggttattatttttttgctgcaaggcatagtagctgggcaggtggtcaaactatttcttgtagccaggtagtaaggctttttattgagccgtaaccaattctatggctgagagaaaaaaaacacatttccctcgcatgactttccttttccctttaaatacctatttattaaaataacaatgtgaatatggagtagagacttattataacatctgtatgaaaacaattgttagaacaaaactaaaattgaaaaagtaccaatttattgttttaaatagagaaaaacatcttatttctttaattttttaattactagtaataaaaccaatgtaatatttgccatcttaaactatttttgagtatatagtttatttgtggtaagtacattctcattgttgtacaacagatctctagaactaaaactgaaactctgtactcgttaaacaaaataccccttctcccctccccacagaccctggaaaccaccattctgttttctgtctgtatgaatgtgactactttaggtatgtcatataagtagcatcatacagtatttgtcttgtgactggcttattttacttagcaatgtcttcaagtttcatccatgttgtagcatgtatcaatttccccttaaagctaaataatattctactgtatgtttatactacatttttttaattcattcatctgtcagtgaagactagggttgcttccaccattggccatcgtgcatggtgctactgtgaacatgggtgtatgttcagatatttctttgagactctgctttcggttcctttgggaacatttacttagtgagccccaatcttcttacagagttatttattttttacgtattagaatgtgggcggaattgatgaagggaaggaggcgatagtgactgtaaaaagtaggcagataatagtctgtccattgtttaaggctctctgtctgcttcagtgtttctcaaagtgttgtccatgtaccacttgcattagaatatctgggatattttgattcttaggcctttcaccagacttttcaagtcagactctcttgtgagactcaggaatttgcaccccaggggattcttgtgtacaccggaatgtgagatgcattgccctactggtaactagacatcccaggatttatctgtgtttatgcggatgaaaactctgttccctgctactaatagcaccttgcttttggggggcacatccatcccatgccagcctatgattttcactttattctgtctgcgtattgtagcccaactaaaagtctcataaatgtagtaaaggagggcagccctgagttcataaccctaaacttggattcaggcccattcaggcccttcttctcaggctcctaatggtgattcactattgctgtgtctgcttctgatcagtgggccagtgaacaggttagaacttcctccctctggccttgtagtgtttaggcttacctgagttcttaaagggaccaaatctctttcctgatacgaacactttaagtatggcatagcaaattgtgatcctaattaaggcagtaatttctcacgttcatcttgtatagctgaatgacatgtgtgacatctttaataaaaccaaccagcttctgcattctgaaactgaactctgtcttcatctagttatcacattgtgctatctctaacatgtgttcttggcttctgattattacatgatctgtgatttgcaagtgactgtttttcattttttgtttttttgatacagaatcttgcttgctctgctgtccaggctggggtgcaatggtgcgatcttggctcactgcaacctccgcctcccgggctcaagcactcctcctgtctcagcccccaagtagctgggaccagaggcccacaccaccacacctctaatttttgtatttttagtagacatggggtttcaccatgttggccaggctggtctcgaactccccacctcaggtgatgcacccgcctcagcctcccaaagtgctgggattacaggcaagagtcactgtgcccagctggagcatattttattttctatttacatatttaggctttaagctgtacacaccaaaaatatttttttatggcagtcctgtttgttctcagcagagcctgtagagcctgttgtcagtggaatgctgagaacagccctttgtagagctttctattggcagtattttgggattcaggctgaggaatggttgacccaacttatacttccagcagtatgtaaatttactctgacatgggaaagatattaacagcagcaacaacacaaaatctttcaagatgcagatttgtacagcataatacagtattgtacaaatgtacatatacaaaattaatttggccttttcagtttctagtcttccagcctggaagtaagaattgtttttaacaaagtgttaaacggctaaattgatgttttggggttccgtcaagatcttccagaaaaattattaccccatagctacaaagtaacaagactgagaactaaggacatcagtgaagcccaagacaagttaattaagagcagaccggtaggactgaccggtggatatgacctcatttagatttgttggtgttcttactttccagattaagcatgcttaactattcagtgtggcccaatgcttttaaagtagtaagcatgtttttgagctgtatgattcgaacagcaatcacatttaaaatctaacatggtgcctaaaagttgtatagaaatatgtatgaaaattcacactaatatattttaacgtagactacctgttctggtgaactcttagtttgaaactttctttatattttagcaatcgtttgtaattctttttattagctcttagtgagtgtgtatgcagcattttctttcttactgtccttctcccacctacagtcaaatcaacagatgtttattgagcattcactttgcatgtgccaattctttcctttgccaatttcgggtgttaataattttggtatgctaatttattacatgctctgtgccattttaatttgcttttctttaattcacagtcagcttgtaccctttcctatatttgtttgctaactgcattccttcctctatggcttagctgttcctgttcttggctcattttcctttgaggttataacagttgtcaacagaatcctgaccaggctcctgggcaagccatgtcttaaccaattagtacttttgttttctctctattcctcttttcttcattatggtggaaaacagacagggattaaatggacagaattagaaaaagtaggaggggaaactaaactgaattggaagagatttaaatgtaatgtgtttaaaactgaattggttaacttaactcaagctttgataagtaatgggaagcaccatgatattatggaataatttgtcattttcaacagacttgggttttagtaccaggtctgcctctgttacatgaatgcaataaagcctacctcacaatgctgccagagcatttaataagattacatgtacgggccttcccctcccatcctctctgtcttagtttgtttggactgctataacaaaataccataaaccgcgtggcttacaaacaacagaaatttatttctcgcagttctggaagttgagaagtccaagatcaagatgctggcaggtttggagtctggtgagggcgcactttttggttcgtagaaggcatcttcttgcttcattttcacatggcagaaggggacagcccagctctcttcaaccccttctaagggcactaatcactcgtgagggctccatcctcatgacctcatgacctcccaaaggctccacctcttactaccaacacactggggattaggtttcaatatacgaattttgcagggatcggggaggacacacactttcagtccatagattctctgatgctgaacgagcgtgtcgctaattgctacacgcaaagacagaatagcagtcgaaaccaagaccttaccccggcttcccatccttctctgcaattagtgtctaatatgttttcccatttaatctttataacagccttagtatgtatcattattcccatttttcagatgaggaaattgaggcactgagaagtaacttgtacaaggtcatagatttggtagaggatttgggtagagttctgtcagatttcaaatccattctctttccacagtgccaggctgcctagaataatgagtgtgactgaagaatgaaaaggagttaatggtgtggccattcccctgttctttccactacttcacttggtgaatgactaataggcaaacactcccagagggtatttgcattttaaaagcgagctcattaaccctaatgaatctctaattggtggaatttgtgggggagatatttttaagtactggggctttctcctgtgtcttcaaggtgcctggctatctttttcttctttataggttatcaactattctggaatcagaatcgtgtagcagaatgcagtcacatactgctagtctgccccaaatgcattaacagggagtcatgaattaaaaggcagccatgaaaaaacattgaaaggaaaaaagtgtgggttagcattgtctaaaatgaatgtccaaaagcaaataaatttggccatatagagagtcttccgaagagtcagatgaaaagaatatattttataaccaaatttaactttagaaatgttatatcagcatttcccatggtgtgttaatgaagctctgcaagatgtttaataggtgtcagatgaataaaatggctccacagtcaaatacacttcgaaaaaaaatttttttttaagtttcatcactgcagaatttcttagatgctaaagtgcattaggaaatcaactggaagagaacttgcattctgaaggtttttctcatatttttgaccatagaaatatttttttccatgtgaaccccttggaaccagtgtttcatagattgcattctcagatacagagttctagataaatcatctttaattaaagaaaagaaaaagaaaaacagttttctgtattcacagccctttgcatgcagacaggctccaacccagtccacaacagcccatttccagtcttgttgggctcaagggcatgccaataataacagccctcttccccagatgagatctggccaattgaggggaggaaaaaggaacagatggagaccaaactctcatctttattgcctataaagctggtgttgaagaatgtggcttataacagggagcaaaagggcgtcctaatcggaatcccagaattaggttgagtgtgtaaaccaaaagtaagatcctaaacccccacaacagactgaacggaccccctctgggcctcaaaaactgaattccccattatgacaggagagatcttggtataccccctcccttttggagtttaggagcaactgactagcattaatgttaaaagagagattataagactgacaaaacagactctttgtagcagtaagataccaaattgcaacctgacactggtataggacctcatgacagatagcagaccctgaaggaaataaaaatattttaccctagaatatatttccttgacatacgttgaaatggccctgcaaagctgtcttttgtgggggagattacatccgtagagaatctccttccctttctagatctttcccagatctaggagagatgaaatgaaaggctgacacctttaaggtctgaagagagacgcttaggatattctctatagggctgttacctgaaggcgtcatctacttaacaagaaccttggcttccacaatgccctttttcttaactcaagcatttacttctagtctttagacaaagctgaactccttcaaccaactgccaatcagaaaatctttgaatccaactatgacttgtaagaacccctactttgagatatcccaactttttaggctgaaccaatatataccttacatgtattgacttatgtctttgcctgtaatttctttctctctaaaatatataaaaccaaactgtaacctgaccgtctcaggcacactttctcaggacctcctgagactgtttcctgggtcatggacacacacattggatccgaataaacctctccaaatattttacagagcttggcttttttgtcagctagttccactcagttacagaatatgctgagctggtcaggcttttccccaagtgggaggatgtttctgtggaggatcagagcagacagcaacatgctgcctgtgttccttgattcttaagagagagggaaggagaagttactggaaaggaatcctgatcttggggagggttcttagatctcctgcaagaaagaatttggggtgagtccacagagtgaagaaagaaactttattaagcaagtaaaggagtaaaagaatggctgccccacaggcagagcagctgcgagggctgctggttggctatttttatggttatttattgattatatgctaaacaaggatgggttattcatgagtttttaaggaaaggggcagggatttcccagagctgagggtttctcttccttttagaccttatagggtaacttctggatgttgtgtaaacagtcatgacgttggtgggagtattgtttagcaggccaatacattataattggcatataatgaacattgaggatgaccagaggccactttcatcaccattttggttttggcttccttctttactgcatcttcatttatcagcagggtgtttgtgatgtttatcttgtgacctcatatcccatcctgtgactaagaatgtctaacctcctggggatgtggcccagcaggtctaagcctcattttatccagatcctattcaagatagagtcactggttcaaaggcctctgacaaggggacagaaccacttgtggccaagtcctcccaaatgcaacaaccagtggacaggagagtggagagaggcctggagtgaatgttaatggaatttcctccatgttgaaggaagcataaggcaagtgacctcacagggttaacaggaattctgaacagaaatatatagatatacttaagcattcttctggctgtactttgacccatttctattttctttcttttttttttttttttttttttttgagatggagtttcgctcttcttgcccaggctggagtgcaatggcataatctcggctcaccacaacctccgcctcccaggttcaagtgattctcctgcttcagcctcccgagtagctgggattacaggcgtgccctaccgcacccggctaattttgcatttttattagagacggagtttctccatgttggacaggctggtttcgaactcccaacctcaggtgatccgcctgcctcggcctcccaaagtgttgggattacaggcgtgagccaccgtgcccggccgacccatttctttgtaaccaaaatttatgtaacaccagatactgaccatttgtatccccattgttcctatagataggattctggttttcgttcaagatagtgtccctgacactagaatcataagctcttggtgaagaattacttaagcagatcctggattctagtggaacaactaacaccaaccagtttaaagacccccacagaggaaccaaatcagcaagagaataccgtttcttcatctccctgccccatgacttcaccccacaattttcaaccaatcagtggtctccacactttggcccactccaaaacccttaaaaaccctacccccaaactcctctggggaaaagatttgagctttcttcatgtctcctcatttggtggccctaagattaaagttctttttctgctgcagcccagtgtctcagtgtattagtctgtttatgttgctataaaggaatacctgagaagggtaatttataaagaaaagaggtttattttgcctcagggttctgcaggctctacaggaagcatgatgctggcaactgcttctggtcagggccccaggaagcttacaatcatggcagaaggtgaagggaaaccagcatgtcacatggcaagagtggaagcaagagaaatgccagactcttaaacaaccacctctcacatggactaatagagtgagaactcattaccacagggagggtacttcatgagggatctgtccccatgacccaaacacctcccagcaggcccacctgcaacattcgaggttacatttcaacatgagttttggaggggacacacatccaaatcataccactcagtgtattgacttaccacatgcatgaacaatgaacctattatggttacattaaggagtgggaaccaagtgtctgccccatcacccacctaccaccaaccccttcagacaagcctcctctgggtgacctaagtaggtatttggttcttctcccatcactggaaatttctgtcctgtccaatttcctttatacatagtgctcactcttcagcattatttctcccctcaaccatcctcacccagtagaatgggatcatgatgatactctaatgaccattcctttctcacatccttatatagctaaaacatcatccaacatttttttttttttttgagacgaggtctcactctgttgcccaggctggagtgcagtggtgtgatcttggctgactgcaacctctgcctcccaggttcaagcaaatctcctgcctcagcctccccagtagctagggttacaggcacatgccaccacccccagctaatttttgtatttttgttagagatggtttcaccatgttggccaggctggtcttgaattccagacctcaagtgatccacctgcctgagcctcccaaagtgctgggattataggcgtgagccaccgtgcctggccatcattcaactttttatcccggaaatgatggaagacatatatttctctaatacagactggaaaactacaggctgccacttgtttttgtaaacaaaattttattggaacacagccacacacattaggttacatattttctatgactgcttgtgactacaatggtagagttgtgaagttgtgacagagaccttatgacctgcaaagactaaaatgtttactatctgaccctttacaaaaaaaatttgccaacccctcgtctaaaatatagatgagtttcacatcagtcctttaagttctgaaagagcttcattagtatgtatatgtagcctttatcatttactcactctaaataaaaactacatttgaaacaaagaaaatcgcatggctgtactataaggataatttttacatcttgtaaaattgtttccagccttaaaaacttcctgaaaaatatgaagggaactgtgtatttgctttgaaggagcagaaggaagaataaagtcttgcatcagtcagaagtatttgatgtcaccattgaaaagggaagaaaacagataatctatggggcctatagaagcaaaaaggagtaatgaaaactgtctgcaggaccagaaggcacaagatcctgccttcagagctccctatcagagcccttggctcctctcttcacaccctgttccctaactcagagtctagtttcctcccaccttggccctcatgcattggaaccgttcaccagaccacagagtccccagagatgtcaagagactgggttctgctcccattgtgactgctttctatgtgggagaccttgggcaggtcactgagtgcctctgccccttaggtttcactctcctgtaaattgggggtgggcagagttatcttactgtgcttgcccaacagtaatcaaatctgatgttttttaaaagcctatatgaaaggtaaggtattatgaaattgtcagtgtttttgtttttgttgaaatgtctgagttgcaaatgaaatttttttatctatccaagatataaattagagttaactgatatttgaaaacttaagtaccttatttcatatttctcatacccatttttgcttatttatttttatagtatttaacttttatatggattagagaaaatatagaaaataactgaatttttaccataataaaataattcttcaaggggtggaaaaaaaacttcaaaaattgtatttcattgtgacccattcttttctgtttgttgtttattcagctttcatttttatgcctttgtttacagagaaacaatcttgcagatggcaattttccttgtaatcatttattgtcctatctgagtcatcgccagacatggcatttcagtaaacagtgattctgcaattgcttccaggcagatgtgttgtgtgaagttaagaacgctggctgataacctttctggtttttcaagcagcagggagaaagttttgtgtagatacacacctcgaaatcagaaaatggcgaaggaaggactttgtgctgcatgattttaaccaaatatagtgtttgtgtgatggatggaatagtaatctttttaaaagataaataatatttcttcgagtaaaggactttttatagtgcgttatacgtattttcttagaaacatcgtgcatgtgcattgttaaacacaacgttgaccttgttgtacagacatttgtatcaccttgtccactcaggttcctgtggtctcatgcctgtagctaagcaaaccaaactcctcatgcattggtttttccagtgtaaattggaggttctcttatccctcactttcagacataggggatttcttttgcctcacaaatatgtttttacaaacacgtatgctcaaatataatttttattatgtatcataaagtcttatcttgtcactgtttttatctgagatggagtttcgctgttgttccccaggctggagtgcaatggcgcgttctcggctcactgcaacctccgcctcctgggttcaagtgattctcctgcctcagcctcctgagtagctgggattacaggcatgtgccaccatgtccagctaattttgtgtttttagtagagacggagtttcaccatgttggtctggctggtctcgatctcctgacctcaagtgatccacccaccttggcctcccaaagtggtgggattacaggtgtgagccaccatgcctggccttgtcacagttttaccatcaactacaaagagaagttcactaatttattcatctaatgtttattgaacacctattgtgtgctgggccctgcccaacaataataatgttgcacaaaacagagaacaaagtaatagggtggaatatgcattgtaaacattttgtgggttaatttatcttaaatatataagctaccaatttagttcttgtttcatgattttataatttaacaggcttataaatattttttattactttaatcactttttttttattgcaataggttttgggggaacagatggtgtttggtacatgagtaagttctttagtggtgatttctgagattttggtgcacccatcacctgagcggtgtacactatacccaaagtatagtcttttatccctcaccctctcccaccctttcccctgagtccccaaagtctaatgtatcattcttatcaacaggcttatattaaatccttcacaattttcatgagacttttccttgattatagccatgagtaaactaaacttttgtgttgcatatggagaaattaagcttagacaagattttcatactttatctccagtcaagactcatgacttttccttacattaacaaatttctaaccattagtgtcagctaagccatcatccatttctttggtaatcttccctgctgtggacattcctaagattgcccaattttatagaaaaagcaatttacaaatggctaaattagcgtctgattatgcttcaaagaagtaggctaataggtagtctctatcatgtgttaatcacaaaccattagtgataattaataaattaaaatgggccaattatgaaattctgcttatacttacccaagtgtgtttgtgtctatcctgtgtccttcaagccagcctactcaccaacttcatttagtaatgtaacccagtcaggcactagccttaggaatcaaagtattaagtgaaggctagtttatgcatttgttcattattctttcctgctgtaaggattatctgtcatctggttaattattacatataaacatacacatctactccaaggcaaatccacaaacgcttacaaagagtaagccttatgaaaaactaacttggaggacagttatccatatcataaaagagtttttatttcaacataatttgccttaagtcataagctttccaagtttgtttgaaatatgacttgatttataaaatatgaatttatttgatttttccagagtaaatctagataaaacaggatacatttaggttgtgtgtgtatgtatttatgaatgatatatgagacctgtttataattactgttcttaaaaagttagcttgtttactttgaaacaagggaaatagtggtttcttccatgatgtgaaacatataataacaaaagatacttcaaacaaatagcaagtagtttggcctcagtaatatggtcaagttttaaaaatagacatatattttacttcataggagatacaacagatgagcaaagaatgacagcaagaggcaaaacttcggacatagaggccaaccaacctttggag

SEQ ID NO: 987 - DNA, 119 bp, Homo sapiens
  full length sequence of bloodCirc_22400
aactggcatcaaatactcacaacatagctcaggatctgtcaaacaaaagttcttatggactcaaaggggcttggaagaattctgtggaagagtggacaacagaagactggactgaagat

SEQ ID NO: 988 - DNA, 206 bp, Homo sapiens
  full length sequence of bloodCirc_02152
tcatttgatccttcaaaaatcacaaggaagaaaagtgttataacttattctccaacaactggaacttgtcaaatgagtctatttgcttctcccacaagttctgaagagcaaaagcacagaaatggactatcaaatgaaaagagaaaaaaattgaatcaccccagtttaactgaaagcaaagaatctacaacaaaagacaatgatga

SEQ ID NO: 989 - DNA, 462 bp, Homo sapiens
  full length sequence of bloodCirc_16992
ggaacagagttcagaggcagcagaaactggagttagtgaaaatgaagagaaccctgtgaggattatttcagtcacacctgtaaagaatattgacccagtaaagaataaggaaattaattctgatcaggctacccagggcaacatcagcagtgaccgaggaaagaaaagaacagtaacagcagctggtgcagagaatatccaacaaaaaacagatgagaaagtagatgaatcgggacctcccgccccttccaaacccaggagaggacgtcgacccaagtctgaatctcagggcaatgctaccaaaaatgatgatctaaataaacctattaacaagggaaggaagagagctgcagtgggtcaggagagccctgggggtttggaagcaggtaatgccaaagcacccaaactgcaagatttagccaaaaaggcagcaccagcagaaagacaaattgacttacaaag

SEQ ID NO: 990 - DNA, 324 bp, Homo sapiens
  full length sequence of bloodCirc_04329
gcggtctatgcttgcttggtgcttatgctgacagtgatgacgatgacaatgatgtttccgaaaaactagcacaatccaaagagacaaatggaaaccagtcaactgatattgatagtacattggccaacttcctagcggagatcgatgccataacagctcctcagcctgcagctcctgtaggagcttctgctccacctccaactccacctcgaccagagccaaaggaagcagcaacatctaccctttcttcttctacttcaaatggaacagactccacccaaacatctggttggcaatatgatactcagtgttcactggcaggag

SEQ ID NO: 991 - DNA, 283 bp, Homo sapiens
  full length sequence of bloodCirc_10286
gagggagatactgagagtgaaccatatgatgatgaagaatttgaaggttatgaagacaaaccagatacttcttctagcaaaaataaagacccaataacgattgttgatgttcctgcacacctccagaacagctgggagagttattatctagaaattttgatggtgactggtctgcttgcttatatcatgaattacatcattgggaagaataaaaacagtcgccttgcacaggcctggtttaacactcatagggagcttttggagagcaactttactttagtgg

SEQ ID NO: 992 - DNA, 2493 bp, Homo sapiens
  full length sequence of bloodCirc_13162
gacctgatattgaatagaagtggtgaaaacagacagacatccttaccttgtctgatggggaaaacatccagtctttaatcgttaagtatgtaatgtcagttgtcagcttcccataaatgtcctttctcagttgagaaagttcctttctgtttctattttgctgagtttttatagcgaataggtgttgcattttatcacatgctttttctccatctattgagaagatcatatagatgttctcctttattgtatcaattaggtacattgattgatttttcacgttataccagtattctggtgtaaactccacttggtcatttgttactctttttatatatcactgcaggagtctgatccacagatcctgacccaacgacagatgaataacttacactgacacagatattatgcttgtctgtctggctgagagtctgggccgcttacagactcccaggagagtgctgtaaagagttgcagccgcgacccagacttgctggccttcccagcatttattcagcacacattaaacgacaaaagtctcaagtaaatgccactagaatgtaattaccgttgccaacccacttagtagagagcaatcatgcacccacagattgtcaacggttagtcttagaaccacatgagtaaacaagctatttagatagactgctctacattcctatgttaattacccttgctatagctcaaagaggattaggctgccttcagccataactctatcctgaggcttctgcaaaaaccttctggccttctaagaaagtttattttacagtttttcccaccatcctgactgaactcctacatctcactgcattggacttgcatatatatatgtgtgtatctatgtatatatacatgcatgtgtatatacacatacatatatttttgagacaggggctctctgttgcccaggcttcaatgccgtgtcgtgatcacagctcactgcagcctcgacctcccaaggctcaagcagttctcccacccaagcctcctgagtagctgggaccacaggtgtgcaccaccatgcccagctaatctttaagattttttgtagagacaaggtctccttatattgcccaggatgttcttgaactcctagccacaagcaatcctcctacctcggcctcccaaagtggtaggattacaggtgtgagccaccatgcctgggcttacttgctaatattttgttaaggattttttgtttctgttcatgagagatatttgtagttttcttcttatgtatttttcaggttttgatatcagagtcatgatgacattagaaaatgagtgacatcacccccttttctgaaagagtttgtgtaggatttgtattgtttctcccttaaaagaataataaaattcagtgaagccatatgggcctggagcttttgttataggaaggctttaaattatgaattcactttcattagttaatagatgctattcaagttttctattgcctcttcaatttgttttgataatttctgtctttcaaggaattttatccagtttgtcagatttattggcataaagtcactcatcgtatatatatatatatattttttttttgagacagagtctcgctctatcaccaggctgaaatggcacaatctcggctcactgcaacctctacctcctgggttcaagtgattcttgtgcctcagtctcccgaatagctgggattacaggcatgcaccaccatacttggctaatttttgtacttttagtataaatgtaaatgtgcctaattataaagccctaaaatatacaaagcaaaaacagacaaatctgtaaggaaaaatacacagattaccacttatagctagagatttcaatacttctttcttacagctacttgggaggccgaggcacgagaatcgcttaaaccgttgaagcagagattgcagtgagccgagatcatgccactgcactccagcatgggtgacagaacaagactctgtctcaaaaaaaaagaaaaagaaaatgaacccctgtaaagcaatttcagcttatgaacccctgtaaagcaatttcagctttgcttcatggtatatttgctttctatccagaggttaatttgttagttttcttaaaacaatgtttttcttaatggtcttattgtttagaagtaacaagtggactggaaaagtatatggggcctaagtttataacattgtcttctcattatcagggaaaaaggagaagccaaagaagttcactagacaaccaaaaaagcaggtatcttcaccctgtgcccagaggaaagaaaaggcattggagaagtcagcttctagagatgtgtctcctttcgttatgagtatgcagaagaataagtgggatgccacaagatccttgagattcaaccaggatgcacaaagagaagacgatcaacggcgaatgactgaaattacagggcacctaataaaaatgagattgggggatctggaccgagtcaagtcaaaggaagcaaaagaa

SEQ ID NO: 993 - DNA, 4577 bp, Homo sapiens
  full length sequence of bloodCirc_01070
ctcattgctatggacagtgctatcaccctgtggcagttccttcttcagctcctgcagaagcctcagaacaagcacatgatctgttggacctctaatgatgggcagtttaagcttttgcaggcagaagaggtggctcgtctctgggggattcgcaagaacaagcctaacatgaattatgacaaactcagccgagccctcagatactattatgtaaagaatatcatcaaaaaagtgaatggtcagaagtttgtgtacaagtttgtctcttatccagagattttgaacatggatccaatgacagtgggcaggattgagggtgactgtgaaagtttaaacttcagtgaagtcagcagcagttccaaagatgtggagaatggagggaaagataaaccacctcagcctggtgccaagacctctagccgcaatgactacatacactctggcttatattcttcatttactctcaactctttgaactcctccaatgtaaagcttttcaaattgataaagactgagaatccagccgagaaactggcagagaaaaaatctcctcaggagcccacaccatctgtcatcaaatttgtcacgacaccttccaaaaagccaccggttgaacctgttgctgccaccatttcaattggcccaagtatttctccatcttcagaagaaactatccaagctttggagacattggtttccccaaaactgccttccctggaagccccaacctctgcctctaacgtaatgactgcttttgccaccacaccacccatttcgtccataccccctttgcaggaacctcccagaacaccttcaccaccactgagttctcacccagacatcgacacagacattgattcagtggcttctcagccaatggaacttccagagaatttgtcactggagcctaaagaccaggattcagtcttgctagaaaaggacaaagtaaataattcatcaagatccaagaaacccaaagggttagaactggcacccacccttgtgatcacgagcagtgatccaagcccactgggaatactgagcccatctctccctacagcttctcttacaccagcatttttttcacaggtagcttgctcgctctttatggtgtcaccattgctttcatttatttgcccttttaagcaaatccagaatttatacactcaagtttgctttctgttacttaggtttgtcttagaaaggttatgtgtgactgtcatgtgaaagttaccccatttctcatcttaattaggattgctaaaatagaaagtttggagtattttcttaaaaaattcattgttctacaagtaaataaatattttgatttttctatttcctcctaaagaaagtacacacactctctcgctctctctcggtcttataaaactcgttggtgtcttataaaacaaacagtgataatctcaagttagaaaacagtaggtcctgagaaccataagaaaaatgactggtgtgatgttgagtaacaagttggtacagttactttagctatttattaacttgctcatctcatagaacattttagtagatttttcacacacctcattattaaaaaaaaacaaacatgctggtgtcttggttacccattattcctctgtacctgaattcaggttggtttttctatttggaaaagactttataaatgttggcttaaaaagaggttgagcaccagaatctcagaatttaccaccaaagaactcatccatgtaaccaaaaaccacttgtacccccaaaaactattgaaataaaaatttaaaaaattttaagtagttattatcacctttatccctcttagtttgtaaaaataatttttgagttttgtcatgataatatttcagacttggagatatttggagtggaggatagggcaatatttaggtttgggttatttgtgtgctgtttcaaggataaaacatcctggtaagtcagtcagtgaatatttttgctttgtgtattgcagacacccatcatactgactccaagccccttgctctccagtatccacttctggagtactctcagtcctgttgctcccctaagtccagccagactgcaaggtgctaacacacttttccaggtaattttataaatatctgtcttctgtagttggagcatgttaaatgaagaaagaggcaaaaaggcagggtcccactattcagtttaatcattataaaacttctatttaatgaatattctttttttatttttttgagatggagtcctcaccatgtcacccaggctggagtgcagtggcataatctcagctcactgcaacctgcaccttccaggttcaagcgattctcctgcctcagcctccggagtagctaagattacaggtgtgcaacaccacgtctggttgatttttgtgtttttagtgagacagggtttgaccatgttgtccagactggtctccaactcctgacctcaggtgatccgcccaccttggcctcccaaagtgttgggattacaggcatgagccattgtgccctgcccaatgaatattctttagatttatttttgaatttccaaatattaattttctagctggcaaacagcttgaataaatatagcaaagtttcattttcattatttactattacatacatttgagttagaccaagaattgttcaatactgtaggagatttagagcctaccccaagtttttgtcactagaaattctctatttaaaaaaaaaaaatgggccaggcagtgtgtgtgtcatgcctgtaatcccagcgctttggtaggccgaggcaggaagattgcttgagctcaggagtttgagaccagcctggacaacctaaggagaccttgtctgtactagaaataaaaaaaattaagttaggcatggtagcacgtgcctgtggcccctagagctacttgggaggctgaggtgggaggaccgcttgagcccagtagatcaaggctgcagtgagctataatggcaccgctgcactccggcctgggtgacacagtgagaccttgtctcaaaaaaacaaaatccacacacacacactctctctctctctcttgctctctctctctctcacacacacacacacacacatatatgggggatctctgcacataggttccctcttttaattaaagattaaaaaaaatttttttttgaggcggagttttgctcttgttgtccaggccagaatgcaatggcacgatctcagctcactgcaacctctgcctcctgggttcaagcggttctcctgcctcagcctcccgagtagccaggattataggcatgtgccaccatgctaggctaattttgtatttttagtagagacgaggtttcttcatgttgatcaggctggtctcaaactcctgacctcaggtgatccgcccgcctcagcctcccgaagtgctgggattacaggcatgagccactgcacgcggcccaagcatttttttttttttaatagagaaaggtcttgaaaatggtatatcaaacagtcccatttctccctcagtcagaattgataatttatcaacattttatatgtacatttttaaaaaaatgaatattatctcttcaccaagacgttaggaaagttcttgccattcctaatgggtttagccattattttgcccaaaacacttagatgttataacttaaagactttcttggagtcaattcatttacttattcatggttgactatctctgattttcttatattttgtaatttaacttctcattcttttagaaatgaaatggtagggaaaaagaggaaaattaaaaatctctctgctttttattttttgccaacgtttaaaattattgaatagaaaaaaaagttgagaatttttcatattttttttcattgccacacatgagcagataattgagttatagagtcagctgagaccttaagcaaagtcatagtgctcctgtagcttcagcctggaatctccctgtagagctggcctcagaatacttgatggggaacccttttctaggatgagtgctatttatacctttctggatctctttttgagggtttatgatttgctccataattgaattacactctgtagtgcatattgtcatttacttgaactttctaaaaccttcatttgaggttaattgtaaacctgtgtaccttaggatatgaaggagggtacaggttgttctttgtttctactccattgaggtaagttggagaatgttaatatttaatatgttaggacaaaagatttttgtttctagtttttgttatgacatcatattctttcatgataaacagccactgcctttgtcctgtgagccattacagaaggctgttgtgttttgcctcaggtaatagagtaggatagaaagtaaaagttggggttgagtaataggatgataatgtgttttgttttctttctcagtttccttctgtactgaacagtcatgggccattcactctgtctgggctggatggaccttccacccctggcccattttccccagacctacagaagacataacctatgcacttgtggaatgagagaaccgaggaacgaagaaacagacattcaacatgattgcatttgaa

SEQ ID NO: 994 - DNA, 166 bp, Homo sapiens
  full length sequence of bloodCirc_11293
gtagacgaagagcggcggagtgcagcgggcagtgagaaagaagaagagcctgaggacgaagaggaggaggaagaggaggaggaatacgatgaggaagaggaggaagaagatgatgaccgaccccccaagaaaccccgccatggaggcttcattctggacgaggctg

SEQ ID NO: 995 - DNA, 271 bp, Homo sapiens
  full length sequence of bloodCirc_02313
ttcacagaagaaaagcttggccaggctgagaagacagaattggatgctcacttagagaacctccttagcaaagctgaatgtaccaaaatatggacagaaaaaataatgaaacaaactgaagtgttattgcagccaaatccaaatgccaggatagaagaatttgtttatgagaaactggatagaaaagctccaagtcgtataaacaacccagaacttttgggacaatatatgattgatgcagggactgagtttggcccaggaacagcttatg

SEQ ID NO: 996 - DNA, 181 bp, Homo sapiens
  full length sequence of bloodCirc_11596
agaagatggcgaattagaagatggtgaaatagacgatgcaggatttgaagaaatacaagaaaaagaagcaaaagagaatgaaaagcagaaaagtgagaaagcctacagaaaatcaagaaaaaaacataagaaagagagagagaagaaaaaatccaaaaggagaaaacgtgagaaacataag

SEQ ID NO: 997 - DNA, 210 bp, Homo sapiens
  full length sequence of bloodCirc_15955
gtgttgtctggaggatggaggaatagacgtgtggcatcaacatcaatgaacagagaatcgtctaggtctcatgccgtctttacaattacaatagagtcaatggagaaaagtaatgagattgtgaatatacggacctccctactcaacctggtggatttagcaggatctgaaaggcaaaaagatacccatgcagaagggatgagattgaag

SEQ ID NO: 998 - DNA, 447 bp, Homo sapiens
  full length sequence of bloodCirc_07534
gcactaaagaaacaagaagctaaagcagatgagcatgagggggcaataaaaaataagctaagacaaactgaaactgagaagaatcaacttgaacaggaattggagctatctcgaaggttattgaatcaatcagaaggcagccgagaaacacttttgcatcaggtagaagaactgcgtacacaacttacgaaagcagaaggtgatcgaaagggtttacagcatcaagtatctcagatttccaagcaacagtcaaactatcaggatgaacaaggggaggactggagatttaggagaggggttgagcgggaaaaacaggacctggagaagcaaatgtcagatttgagagtgcagctgaacttcagcgcaatggcatctgagttagaggaagtgaaacggtgcatggagagaaaagacaaggagaaagcacatttggcatcacaagtagag

SEQ ID NO: 999 - DNA, 397 bp, Homo sapiens
  full length sequence of bloodCirc_00616
gagtctgtaacagactatactacaccctcttcttctttgcctaacaccgtggctactaataatacaaagatggaggatactttggttaataatgtgcccctgcccaacacccttcccctccctaagagggagactatacaacagagctccagcctaacttcagttcctcccactactttcagcctcaccttcaagatggagtctgcacgcaaagcatgggagaattctccaaatgtaagggaaaaggggtctccagtaacttccacagcacctccaattgcaactggagtcagcagtagtgccagtggaccaagcactgctaattacaattcgttctcaagtgcatccatgccccagattcctgttgcttcagtcactcctacagcatcactatcag

SEQ ID NO: 1000 - DNA, 267 bp, Homo sapiens
  full length sequence of bloodCirc_01909
ccttccttgaatccagaagctggcaaacagcatcagccatgcagacctattgggacaccttctggagtatgggaaaacccgcctagtgccaagcaaccctccaagatgctagttatcaaaaaagtttccaaagaggatcctgctgctgccttctctgctgcattcacctcaccaggatctcaccatgcaaatgggaacaaattgtcatccgtggttccaagtgtctataagaacctggttcctaagcctgtaccacctccttccaag

SEQ ID NO: 1001 - DNA, 1128 bp, Homo sapiens
  full length sequence of bloodCirc_04787
acttaattcagtgcacaaatgagatgaatgtgaacatcccacagttggcagacagtttatttgaaagaactactaatagtagttgggtggtggtcttcaaatctctcattacaactcatcatttgatggtgtatggaaatgagcgttttattcagtatttggcttcaagaaacacgttgtttaacttaagcaattttttggataaaagtggattgcaaggatatgacatgtctacatttattaggcggtatagtagatatttaaatgagaaagcagtttcatacagacaagttgcatttgatttcacaaaagtgaagagaggggctgatggagttatgagaacaatgaacacagaaaaactcctaaaaactgtaccaattattcagaatcagatggatgcacttcttgattttaatgttaatagcaatgaacttacaaatggggtaataaatgctgccttcatgctcctgttcaaagatgccattagactgtttgcagcatacaatgaaggaattattaatttgttggaaaaatattttgatatgaaaaagaaccaatgcaaagaaggtcttgacatctataagaagttcctaactaggatgacaagaatctcagagttcctcaaagttgcagagcaagttggaattgacagaggtgatataccagacctttcacaggcccctagcagtcttcttgatgctttggaacaacatttagcttccttggaaggaaagaaaatcaaagattctacagctgcaagcagggcaactacactttccaatgcagtgtcttccctggcaagcactggtctatctctgaccaaagtggatgaaagggaaaagcaggcagcattagaggaagaacaggcacgtttgaaagctttaaaggaacagcgcctaaaagaacttgcaaagaaacctcatacctctttaacaactgcagcctctcctgtatccacctcagcaggagggataatgactgcaccagccattgacatattttctacccctagttcttctaacagcacatcaaagctgcccaatgatctgcttgatttgcagcagccaacttttcacccatctgtacatcctatgtcaactgcttctcaggtagcaagtacatggggag

SEQ ID NO: 1002 - DNA, 530 bp, Homo sapiens
  full length sequence of bloodCirc_11447
ggatacctcagacaatggcagcttttggattgaaatatttgctgaatgacactggatgtaagtttgtcttttattatcacagggtgggcacaagagtttccctcagcaccatctgccttctcaatggattccaagccattaagctcaaccccagtatatgcaggtggatggagatcaagattagatccccaaggtttattgacttctgttgtctcctctgctgggccccccatgtcttgatgaatgcatctgttcttctattagtgaatggcccactgaatagcaaaaacagtagtgcaaaaaacaattatggatactgttcttacaaagcatcaaagagatttagctcattacatgcagtcttatatttttcccctgattttatgagtttgggcttcatggtctgggccagtggctccatggtcttcttcctctacagacacaagcagcaagtccaacacaatcacagcaacagactctcctgcagaccttcccaggaagccagagccacacacaccatcatggtcctg

SEQ ID NO: 1003 - DNA, 392 bp, Homo sapiens
  full length sequence of bloodCirc_16169
gaatatcttatcaaattaggcaatacagaatgtcatcctgaacagtttttggaaagaagatcaaaattagataaactattgattattattcaaaatgaagacattgcaggtttcattcacaagatacctggcttggtgactttaaagaagctcccctgtgttagttttgctggtgttgatagcctggatgatgttaaaaatcatacatacaatgaattatttgtatctggaggttttatcgtatctgatgaatcaattctaaacccagaggttgtcacagttgagaaccttaaaaattttttgacattccttgaggaacttagtactccagaaggaaaatggcaatggaaagtccactgtaaatttcagaagaaactaaaggaactaggcag

SEQ ID NO: 1004 - DNA, 151 bp, Homo sapiens
  full length sequence of bloodCirc_09079
gagtgtttctcaggagctatcagaaactatcctcaccatggtagccaattgcagtaatgttatgaataaggccagacaaccaccacctggagttatgccaaaaggacgtcctcctagtgctagcagcttagatgccatttctcctgttcag

SEQ ID NO: 1005 - DNA, 196 bp, Homo sapiens
  full length sequence of bloodCirc_00804
ggaagaagacaaaaatatatttgattactgcagggaaaacaacattgaccatataaccaaagccatcaaatcgaaaaatgtggatgtgaatgtgaaagatgaagagggtagggctctacttcactgggcctgtgatcgaggacataaggaactagtcacagtgttgctgcaacatagagctgacattaactgtcag

SEQ ID NO: 1006 - DNA, 165 bp, Homo sapiens
  full length sequence of bloodCirc_13521
tgtctgaatcaatggaattatgtgctgctgtagaagttatggaacaaggagtaccagaaaaggaagagacaccacctcctgttgaaccagaagaagaagaagatactgaggatgctggattggatgattgggaagctatggccagtgatgaggagacagaaaaag

SEQ ID NO: 1007 - DNA, 180 bp, Homo sapiens
  full length sequence of bloodCirc_02559
atgttacatcctgtccactgcagacaacgtattgactttgtcgctgcgatcatccagaacaaacccggagacgaaaagcaaagtagaagatccagagattaactccatccaggacattaaggaagggcagcttctgaggggctatgtagggtccatccagccacacggtgtgttctttcg

SEQ ID NO: 1008 - DNA, 507 bp, Homo sapiens
  full length sequence of bloodCirc_06318
aaaaacacaccttgactttagtcagatacatcactgtctgttaaaggaaaccaagcgtgaagtggaagtctaacacatgaggatacagaattgattcaaaatgggaacaacaagtgatgagatggtgtctgtggaacagacctcctcctcttctctaaaccccctgtgttttgaatgtggccaacagcactggacaagagaaaaccatttgtacaattaccagaatgaagtggatgatgacctagtctgccatatttgccttcaacctctgctgcagccactagacacaccctgtggacatacattctgctacaagtgcctcagaaactttttacaagagaaagatttctgtccgttggaccggaaaagacttcattttaagttgtgcaagaagtctagtattctagttcataaactcctagacaaattattagttttatgtccattttcttcagtgtgcaaagatgtaatgcaacgttgtgatctggaggcacatctcaaaaacag

SEQ ID NO: 1009 - DNA, 153 bp, Homo sapiens
  full length sequence of bloodCirc_11563
ctggaaacattgcccaaagaagacctcatcaagtttgccaagaaacagatgatgctaatacagaaagctaaatcaaggtgtacagaattggagaaagaaattgaagaactcagatcaaaacctgttactgaaggaactggtgatattattaag

SEQ ID NO: 1010 - DNA, 851 bp, Homo sapiens
  full length sequence of bloodCirc_02763
cttcctgcctgacacagctcacttcaagaagtgcacaatgtcagaacgtggaattaagtgggcttgtgaatattgtacgtatgaaaactggccatctgcaatcaagtgtactatgtgtcgtgcccaaagacctagtggaacaattattacagaagatccatttaaaagtggttcaagtgatgttggtagagattgggatccttccagcaccgaaggaggaagtagtcctttgatatgtccagactctagtgcaagaccaagggtgaaatcttcgtatagcatggaaaatgcaaataagtggtcatgccacatgtgtacatatttgaactggccaagagcaatcagatgtacccagtgcttatcccaacgtaggaccaggagtcctacagaatctcctcagtcctcaggatctggctcaagaccagttgctttttctgttgatccttgtgaggaatacaatgatagaaataaactgaacactaggacacagcactggacttgctctgtttgcacatatgaaaactgggccaaggctaaaagatgtgttgtttgtgatcatcccagacctaataacattgaagcaatagaattggcagagactgaagaggcttcttcaataataaatgagcaagacagagctcgatggaggggaagttgcagtagtggtaatagccaaaggagatcacctcctgctacgaagcgggactctgaagtgaaaatggattttcagaggattgaattggctggtgctgtgggaagcaaggaggaacttgaagtagactttaaaaaactaaagcaaattaaaaacaggatgaaaaagactgattggctcttcctcaatgcttgtgtgg

SEQ ID NO: 1011 - DNA, 117 bp, Homo sapiens
  full length sequence of bloodCirc_10253
tctctggcgaacatagacgaagtcgtgaacaaaattaggctgaaaataaggagactggatgacaatattcgaactgttgtaagaggtcagacgaacgtggggcaggatggacggcaa

SEQ ID NO: 1012 - DNA, 251 bp, Homo sapiens
  full length sequence of bloodCirc_14888
gtattaatctctggagaagacacatccacagttagcactttcttcagatgctgacgctcggtgaacagttgcctttggtcacaagatttagaagacacagtgtccatcctcccagattggatctctttttcatatggatcttctgtttctatgtctttttaaaaaataactttttgggaaaccttttggattacaactgttcatcctcacctatgcaaagaaagggaagctattgctgggattttgaggag

SEQ ID NO: 1013 - DNA, 265 bp, Homo sapiens
  full length sequence of bloodCirc_00354
cattcctgggagatggtcgggaagaagaagggagtctcaggccagaaggatggtggccagacggaatccaatgaggaaggcaaagaaaatcgagaccgggacagagactatagtcggcgacgtggtgggccaccaagacgggggagaggtgccagccgtggacgagagtttcgaggtcaggaaaatggattggatggcaccaagagtggagggccttctggaagaggaacagaaagaggcagaaggggccgtggccgaggcagag

SEQ ID NO: 1014 - DNA, 159 bp, Homo sapiens
  full length sequence of bloodCirc_22404
gatttggacgtggcagagggagaggggcaggaaggttctcaacccaaggcatggggacatttaatcctgcagactattcagattctacatctacagatgtgtgtgggacaaagctagtagtttgggaagctgctcagaatggtgcagatgagggaactg

SEQ ID NO: 1015 - DNA, 1624 bp, Homo sapiens
  full length sequence of bloodCirc_05176
agtgctgccacctgtgccaggaggtgtgggcgattgtaaaaacattagacataagagagcctggaaaaatggatctgttttctgacagtgaccacggtgtaagataatttaagatactagtactattgtttattgaactcattgcaagtgggcattttgtaggagtgtgggaaggctggatttttttagttttgtaatctgtatctatagattacagtctacaattccaaatggtgggattgataaaacctttgtttagataactccaagcaagaacctagcttctccactcctcctagctttttatttttaaatatatttacacacttatatgcatatgcctctttttccacctaaactatttgaggcaattttcagacttcacggacctttgcccctaaatacttcagcatttaagtcctgtgaatgagaatgtgaagcactcttttacgtaaccagagcacttttggcatgctcaagaaatttaatatcgatataattaaattatctaatatttagtccatattcaaatttcccaattgtcttagcaataccttttatagttttctctctctctgatccagaatgcaatcaggatcacacatttttagatggcttgtgtcctctcatttagaatattcctgaagttgtcttggggatcaatgatattgatgttatttgaagggagcagtttagttgtcctgtaaaatatcccacattttgaatttgtctaattgttttcttacagttagagtcaggataaacatatttggcaagaatactgagtaggtgatgttgtgtcctttccacggcatcacatcagaaacaggtcatgtcagtttgtctcaatattgatggtactgagcttgatcccttgattaaggtagtgtctgccagatttctccagtgtaaagatatcctttccttttgtaattgttaagtaaatttgggatgaaactttgagattgtgtgaatatctctttcctcaaaagagcctaattttgagcctgtttaaaccaaccgaaaaattccggaatcacctgcttttagaaaatcagttgagatcacatgaagactgcatttttaagtcacagcagagttcaagaggagaagagaataaaatattgaagatctaccaaaggcaaattataatggcaatgtcacactatgaaaatgaatagcccctattgcttagcatacctaaaaagagaagtgttgacattgaattttccaaaatcatagacaataatgtatgtaggaatatattactgtgtatcttagagtctgtgaactttcaattgatttttgatggtttctggttatccttaactaaatggtaaaaataatttcatcggtattatacatgaatttattatcagttgaaattaaaaaattgctttctggaaaagtaatgactattttatatataaattgacaggaataagattatctcttgtcattttgaaaatttctttcaaggagaaaatctgatctttgactcattttcactctgtttttctatctttttttttagtggtattaaatttgtgagtcattgaaattaatccctgactgaattggaaaggaattgtatttgcagtatttggatttatttatttttcag

SEQ ID NO: 1016 - DNA, 631 bp, Homo sapiens
  full length sequence of bloodCirc_01113
tgagaaagatcagtctaaagaaaaggagaagaaagtgaaaaaaacaattccttcctgggctaccctttctgccagccagctagccagggcccagaaacaaacaccgatggcttcttccccacgtcccaagatggatgcaatcttaactgaggccattaaggcatgcttccagaagagtggtgcatcagtggttgctattcgaaaatacatcatccataagtatccttctctggagctggagagaaggggttatctccttaaacaagcactgaaaagagaattaaatagaggagtcatcaaacaggttaaaggaaaaggtgcttctggaagttttgttgtggttcagaaatcaagaaaaacacctcagaaatccagaaacagaaagaataggagctctgcagtggatccagaaccacaagtaaaattggaggatgtcctcccactggcctttactcgcctttgtgaacctaaagaagcttcctacagtctcatcaggaaatatgtgtctcagtattatcctaagcttagagtggacatcaggcctcagctgttgaagaacgctctgcagagagcagtagagaggggccagttagaacagataactggcaaaggtgcttcggggacattccag

SEQ ID NO: 1017 - DNA, 3042 bp, Homo sapiens
  full length sequence of bloodCirc_13008
gaaaaagaacactgagagcccagcatgcatatccaccttcaagatttaataatttgagatttcaactgtcccttaaggaaagctgattttagaagagagaaggtaaaactattcaataattattatccataataaaatatattatagttcctttttcttagccaattaaaggaaaatactatgtattaataggatatgtaatttgggggtatagaaaacatttttttaactcatctaattatttttagtttttgtgatgatgactactgatttgtcctgtgctacatataattctttgtcacagttttattagcatatattatagccaagtgcttgcttggctatgaagagggcatttttattctgttccatgttatttttcttaccaaaaaatgcaacaaaaaactaaagtctattcaaaaaaagcttatttcattatttaaaaaaattctttcccatattccatatttcttttgttagtgtaataaccaatttttttttccagaaatttaacctctcccctgcttgtgtcattcaggtttggcccaaaagcaaacaatggaagtacttctgacctacctttgttagaaactttgcatatctaaatcattgcttgcaagagtgtgagggaaagtaagagtaaagaggatagaatataagagattgctctgtcctaagatattgatggtctattgggaaatcagataaccacatatgacacactctatcagcaagccagattacttttaagttctaagatatgtgaaaaagttaatagtatcagtcttcagagagaaaagagaaattacagcaggcttgagatgtcatagaagttttagactaaactttggtgataaaagggaagaggacctttgagatgaaaattttcaaatattcctatcagaattctcagcccagagatgatacatgcagcaaactgagaaaaagaggaaaaaagaatcgcttctaggcttcttcatttgtccacgtgaagtctgtccaaacccagtgtgacagagttgtagtttcaagcacgctgttcttagatcttagactgctgtgacaaaataccttagactggttggcttaaacaacagaaatctatttctcacacttctggaggctaggaaatctaagatcaaggtgcctccagattctgttcttgctgagttcgtctcctggcttgtcctagaagggctgtcttatccttatgttcttacatggcttttccttgatgaatttacttgtggagagaggtagagaaagaggaaaagagagaggggaagagcgggtggggagagagagagagagagagagagaaaacgaaacgggaagggggagagagagttgtctctttttgtaagggcccagatgctgttatgaaggccccatcttcatgacctcatctaagccttattacttcccaaaggccctatcttcaaataccatcacattagggattagggtttcaacatattaattttgagggacacaaacattcagaccataacacaacccagaactcatctgtgttatggtgagtcccacccttgccttaattccctatcttcccccagaatcctagaagataagacacactgctcaaatgacttaggacttagtttagggcactccctttagggtcatatgttgtattagttcagatttcaagtatttatagatatttttgaatttatgtttaattctttattcaaaatgagctttttgagagctcataattggcttaccttatgattccataaaagtgaatatttggctttagacaagtgtaatttgtttatttaacaaccatttaatggatgcctatgatgtgcttctttctgatttttggcctaggggtttgttcaatttcctatgcctcttacaagggcagaattgaggtggggccttttagtttttctgcgtccttgccagcctttggtgttgctgttatttttattttagccattttaatagatgtatggtgatatctcattatggctttaatttgcatttccttaatggctgatgttgtcaaagatctcttaatgtgcttattttccatctgtatatccttttttgtgaaatacctgttcagtgtcttgcccattgtgttagtctggttttttgttgctatgaaggaatatctgaagctgggtaatttgtaaagaaaagaggtttatttggctcatggttctacagcttgtacaagaagcatggcaccagcatctgcttctggtgatggcctccagctgcttccactcatggcagaaggcaaaggggagccagtgtgcacagaggtcatgtggtgaggggtgggaggagagatgccaggctctttttcacaactagctctcactgaatctaatagaccaagaactcacttattactgcaaggatgataccaagccatttgtgaatgatcccatccctgtgaaccaaacacctcacgttaggccccacctccaacactggggatcagatttcaacatgagatttggaggggtcaaacaaaccatattgaaactagagcacccactttctaattgtttttttttaataattgagttttgagaatttgtaaatatattctacatgctactctttgttggatatgcagtagtttgcaaatgttttctctcagtctgcagctactcttttcatctgcttaatagggtcttttgctgagcaaaggcttttagttttgatgaagtccaatttatttttctttgtgggttgtgcttttggcatcaattctaagaactagttttgtagctctaggtcctgaaaacttttcttctgtttttatctgaaagttttatagtcttatgttttacattaagtctgtggtccagtttgagttaattttttgtataaggtgggagtttttggtgaagattcacttttttgctgatgtccagttgctctattctttatcataaaggtcttcatcctcatcatcttaccattgaataggctgaggtgaaggaggcggaaaaggaggagtttgtcttgctgtcagaggcggaagaaaatccatgt

SEQ ID NO: 1018 - DNA, 165 bp, Homo sapiens
  full length sequence of bloodCirc_16696
attactattttggatgcaaaacggagcatgaacattgggatatttcttaagcaatttaagaagtctcctcggtccattgtagaagatattcatcaaggaaaaagtgagcattatggatcagagaccttgcgagaatttcttaagtttttgccagagtcagaagag

SEQ ID NO: 1019 - DNA, 344 bp, Homo sapiens
  full length sequence of bloodCirc_17750
gttaaaaacgacaaccaacatcagccatgaaagatccaagtcgcagcagtactagcccaagcatcatcaatgaagatgtgattattaacggtcattctcatgaagatgacaatccatttgcagagtacatgtggatggaaaatgaagaagaattcaacagacaaatagaagaggagttatgggaagaagaatttattgaacgctgtttccaagaaatgctggaagaggaagaagagcatgaatggtttattccagctcgagatctcccacaaactatggaccaaatccaagaccagtttaatgaccttgttatcagtgatggctcttctctggaagatcttgtg

SEQ ID NO: 1020 - DNA, 375 bp, Homo sapiens
  full length sequence of bloodCirc_19832
cgaatacaagctagcattctaaaagcatttaacaacccaactactaaaactgctgatgatgaaactagaaaaaaagtcaaagcatatggaaaagaaggtgtgaaaatgaacttcatagatcggatctttattggtgaattaactagcacggtcatgtgtgaagaatgtgcaaatatctccacggtgaaagatccattcattgatatttcacttcctataatagaagaaagggtttcaaaacctttactttggggaagaatgaataaatatagaagtttacgggagacagatcatgatcgatacagtggcaatgttactatagaaaatattcatcaacctagagctgccaagaagcattcttcatctaaagataag

SEQ ID NO: 1021 - DNA, 214 bp, Homo sapiens
  full length sequence of bloodCirc_22387
tcatccgtccttggctcaggatttggagagcttgcaccaccaaaaatggcaaacatcaccagctcccagattttggaccagttgaaagctccgagtttgggccagtttaccaccaccccaagtacacagcagaatagtacaagtcaccctacaactactacttcttgggacctcaagcccccaacatcccagtcctcagtcctcagtcatcttg

SEQ ID NO: 1022 - DNA, 156 bp, Homo sapiens
  full length sequence of bloodCirc_01075
aaataggaaggttgttgattactcacagtttcaggaatctgatgatgcagatgaagattatggaagagattcgggccctcccactaagaaaattcgatcatctccccgagaagctaaaaataagaggcgatctggaaagaattcacaggaagatag

SEQ ID NO: 1023 - DNA, 170 bp, Homo sapiens
  full length sequence of bloodCirc_22554
gaaaaaaatccgtctctaaaaaagcaatcacaaagaagaggaaaactgtcataaagtcacctactgtaccagagtttcagcttatttgcactaatcttgatgaactcagggaattaatcacaaaaatcgagaatgaactcaaagatctggaaaacagtagaaaaaaatcg

SEQ ID NO: 1024 - DNA, 551 bp, Homo sapiens
  full length sequence of bloodCirc_05081
ccggggaaatgtctgatgaggagataaaaaagacgacactagcctcagctgtagcctgtttagaaggcaagtcaccaggagagaaagtagcgattatccatcagcatctcggccgtcgagaaatgacagatgtgatcattgagaccatgaagtccaacccagatgaactaaaaactacagtggaagaaaggaagtcttcagaagcctcccccactgcgcaaagaagtaaagatcacagtaaggaatgcataaacgctgccccagattctccgtccaaacagcttccagaccagatttcattcttcagtggaaatccatcagttgaaatagttcatggtattatgcacctatataagacaaataagatgacctccttaaaagaagatgtgcggcgcagtgccatgctgtgtattctcacagtccctgctgcaatgaccagtcatgaccttatgaagtttgttgccccatttaacgaagtaattgaacaaatgaaaattatcagagactctactcccaaccaatatatggtgctgataaagtttcgtgcacag

SEQ ID NO: 1025 - DNA, 502 bp, Homo sapiens
  full length sequence of bloodCirc_07080
aacataaattattaggaaacattaaaaatgtggccaagacagctaacaaggaccacttggttacagcctataaccatctttttgaaactaagcgttttaagggtactgaaagtataagtaaagtgtctgagcaagtaaaaaatgtgaagcttaatgaagataaacccaaagaaaccaagtctgaagagaccctggatgagggtccaccaaaatatactaaatctgttctgaaaaagggagataaaaccaactttcccaaaaagggagatgttgttcactgctggtatacaggaacactacaagatgggactgtttttgatactaatattcaaacaagtgcaaagaagaagaaaaatgccaagcctttaagttttaaggtcggagtaggcaaagttatcagaggatgggatgaagctctcttgactatgagtaaaggagaaaaggctcgactggagattgaaccagaatgggcttacggaaagaaaggacagcctgatgccaa

SEQ ID NO: 1026 - DNA, 189 bp, Homo sapiens
  full length sequence of bloodCirc_06866
atctgacaggatggcatctgatgactttgacatagtgattgaggccatgctggaagctccctataaaaaagaagaggatgagcaacaaaggaaagaagttaaaaaggattatcctagcaataccaccagcagcaccagcaacagtggcaatgagaccagtggaagcagcaccatcggggagacaagcaa

SEQ ID NO: 1027 - DNA, 656 bp, Homo sapiens
  full length sequence of bloodCirc_12525
gttcagccgtctgtatatctccccagatacctgaaactgaccacctgagtacgttttcccattgctgagctgtttccctgatatctggccatgcaacggagatcaagagggataaatactggacttattctactcctttctcaaatcttccatgttgggatcaacaatattccacctgtcaccctagcaactttggccctcaacatctggttcttcttgaaccctcagaagccactgtatagctcctgccttagtgtggagaagtgttaccagcaaaaagactggcagcgtttactgctctctccccttcaccatgctgatgattggcatttgtatttcaatatggcatccatgctctggaaaggaataaatctagaaagaagactgggaagtagatggtttgcctatgttatcaccgcattttctgtacttactggagtggtatacctgctcttgcaatttgctgttgccgaatttatggatgaacctgacttcaaaaggagctgtgctgtaggtttctcaggagttttgtttgctttgaaagttcttaacaaccattattgccctggaggctttgtcaacattttgggctttcctgtaccgaacagatttgcttgttgggtcgaacttgtggctattcatttattctcaccagg

SEQ ID NO: 1028 - DNA, 713 bp, Homo sapiens
  full length sequence of bloodCirc_12560
gatgttcacggaagaccagggtgtagatgacaggctgctctatgacattgtattcaagcacttcaaaagaaataaggtggagatttcaaatgcaataaaaaagacatttccattcctcgagggcctccgtgatcgtgatctcatcacaaataaaatgtttgaagattctcaagattcttgtagaaacctggtccctgtacagagagtggtgtacaatgttcttagtgaactggagaagacatttaacctgccagttctggaagcactgttcagcgatgtcaacatgcaggaataccccgatttaattcacatttataaaggctttgaaaatgtaatccatgacaaattgcctctccaagaaagtgaagaagaagagagggaggagaggtctggcctccaactaagtcttgaacaaggaactggtgaaaactcttttcgaagcctgacttggccaccttcgggttccccatctcatgctggtacaaccccacctgaaaatggactctcagagcacccctgtgaaacagaacagataaatgcaaagagaaaagatacaaccagtgacaaagatgattcgctaggaagccaacaaacaaatgaacaatgtgctcaaaaggctgagccaacagagtcctgcgaacaaattgctgtccaagtgaataatggggatgctggaagggagatgccctgcccgttgccctgtgatgaagaaa

SEQ ID NO: 1029 - DNA, 4727 bp, Homo sapiens
  full length sequence of bloodCirc_15719
agtgatgacagacctaatgctctattaagttcacctgcaacagaaacagttcatcattcccctgcatattcttttcctgctgctatccagagaaatcagcctcagcgccctgaaagcttccttttccgagcaggtgtcagggcagaaaccaacaaaggtcatgcttcaccccttcctccatctgctgcacctaccactgattctacagattccataacaggacagaattcaagacagagagaagaagagctggaattaatagaccaactgcgtaaacatattgagtaccggttgaaagtgtctctaccttgtgatctcggagcagctctaactgacggtgttgttctttgccatttggccaatcatgtgcgacctcgatctgtcccaagcattcatgttccctcaccagctgtagtaagttgataatcctaaaaagccttggctattcatcagacatttgttaagcacagtggacagacatttcttaagcattgtgctagatattaaggatacagatataaagagtccagtctctaccttcctggtctcacttctactcgagaagaaatagacatgtatacagctacttacagcagtgcgataaatgtaagaaaggcatgtacagtgtgtgttatagggatataaaaaggggccacttaactccacctggagagttcagggaagccttcccagaacgggcaaaatttgaactaattcttgaagtttaagaaggaattttccagcagtacagagaggggagggggccttccaggcataggatttctagattcagaagctaaggaaagtttggcttttacttaaggaattggtaaattgttcagaatggatcgtgcacagggttgtaatacaaatggtaaggggtaaggctagagacgtgagctggggccgtggtacaaaggccttatgaaccgtgtgaaggacgtttaccctagtacagacaatgaggatacactgaattaaagagggaataccatgattctaactgcagtttagaatgacgaatctaggctgggcgcggtggctcatgcttataatctttgcaatttgggaggccgaggcagacgattgcttgagcccaggagtttgagaccagccaggacaatatggcaaaaccccgtctctaccaaaaatacaaaaatcagctgggtatggtggcatgtgcctatagtcccagctactcaggaggctgatgtgggaggatcacttgagcccaggagttcgaggctgcagtgagccgtgattgtgccagtgcactccagcctaggtgagagagcaagaccctgtctcaaagaaaaaaaaaaaaaaaaaaaaggaatgatgaatctaggtgctaagtgagaaatggaaaaattaaaggtggtacactacaaagatgcccaagccaggctcagtggcttgtgcctgtagtcccagctacttgggagcctgaggcatgaggatcctatgagcccaggagtttgagaccagcttgggtgatcttgtttcttaaaagaaaaaggaaaagagactgggtgcactggcttacgcctataatcccagcgttttgggagcccgaggctggtggatcacctgaggtcaggagttcgagaccagcctggccaacatggtgaaaccccaactctactaaaaatacaaaattagccaggagtggttcatacatctgtaatcccagctacttgggaggctgagccaggagaatcacttgaacccaggaggcggagcttgcagtgagctgagatcgcaccactgcactccagcctgggcaagacagagcgagactctgtctcaaaagaaaaaaagggaaaagaaaagaaagatgcccaattaaaaggctgttgtattagtccaggccaggaagataacaagccgggactaaagcctggactaactgggcagtgagagggaagatggttcaaaggtaaaactgacatgatctgtgaccgacctcaggtggaagatgagggagaaaatgcattcaggataactggcaggttctctttgcactgctggtcaggtctgggcatcagtttcaggatggcagtccacaaaagaacaggctttgggttgacacacccctcctctgttttcctcacatttttatcatgaaaaatttcaaccttcagaaaagtggaaagaatcctacaacgaacactattaaagtctgcacctagatctgacgtttcttgcattttgccgcacttgctttatgtatctatatttgtatgtgtattttaactacaccatccaaaacttacagatgtaatatacttttcccccagtgtgtttcagggacctgtcctaggccaccttgctcttcccttaagcccatagccagtgacggacaagcatggggctgagccctcctacctcaaggagggagtgtcgtgtggttcacacttgtgagctccctgtgggatcaagctgaagctgagaaggagacaagcaggaggatcacctgtggctgggagtttaagaccagcctgggcaatatagtgagatcccatctctacaaaaatacttaaaaaaattaggcgtgcacctgctactcaggaagctgtggcgggaggatcacttgggcccaggagtttgaggctgcagtgagccacgatcatgccactgcacaacaacctgggcaacagagcgagaccctgaccctaaaaaagaaagaaagggccaggcacagtggctcttgcctgtaatcccagcactttgggaggcccaggtgggcagatcacgaggtcaggagttcgagaccatcctggccaacatgatgaaaccccatctctactaaaaatacaaaaattagctgtgcatggtggtgcacacctgtagtcccagctacttgggaggcagaagcaggagaatcacttgagtccaagagacggaggttgcagtgagccaagatagcaccaccacactccagcctggcgacagagtgagactctgtctcaaaagaaaaaaaaaaaaaaaaaagactgaaaggaaatgaatcaagtgttgtagttacatttaaatgatgaactatgggtaattaatttttttggctgttcctccaagttttctttagtgcaggggtccccaacccctgggccacaaatgggtaccagtctgtggcctgttaggaactgggctgcacagcaggaggtgaacaggccagtgagcaaagcttcatctgtatttacagccactccccattactcacatcaccacccgagctctgcctcctgtcagatcagcaacagtattagatcctcagaggagcatgaacgctggtgtgaactgcgcatgcgaggaagggatctaggccacgggctccttatgagaatctaatgcctgatgatctgtcagtgtctcccatcatccccagatgggactgtctagttgcaggtaaacaagctcagggctcccactgactctacattacggtagatttcattatgtatgattatttcattatatattacaatgtaataatagaaataaaatacacaataaatgtaatgtgcctgaatcagcctgaaaccatcccccccagctccagccctgtccatggaaaaattgtcttctgtgaaaccagtccctggtgccaaaaaggttgaggactgctgccttagtgttacactgttttaaaatggaaaaaaaaagtttgtaactattcgttcaaagtttttctatttagtacttgccttccaaaatcaaagccaatgtctcaagtgtggggtgacaaagtactgcccacaggccagcacttcttcttgtaaatcaagtttcactggaacccagtcacactttcttgtttgcatattgtctatagttgctttcaagctcctggcagactcgagtggttgcaacagttctttttttttttttgaaatggagctttgttcttgttgcccaggcaggagtgcaatggtgcgatctcagctccccacaacctctgcctcccgggttcccgggttcaagtgattctcgtgcctcagcctcccgagtagctgggattacaggtgcccgccaccacacctggctaatttttgtattattagtagagacggggtttctccatgttcgtcaggctggtctcgaactcccgacctgaggtgatccgcccacctcagcctcccaaagtgctgggattatggcgtgagccaccgcacctggcattgcaacagttcttatggccctcagaactaacatttattatctgatcctttaaaaaaaagttcgctgaccccctagtctacagcattgagagttatgaagcgattgccaggagtatttctaaagttagcaaatattttttaatgttgctagtaggctgggcatttagctgatgcctctgatcccagcactttgggaggctgaggcaggcagattgcttgaactcaggaattcaagaccagcctgggcaacgtggcgaaccctgtctctacaaaaattgcccaggtgtgatggcatgcaactatagtcccagctacttgggaggctgaggtgggaggatcacctgagcctgggaggtcaatgatacagcgagccaggcttgcgccactgcactccagcctgggtggcagtgagaccctgtcccagaaacaaaacttctctagtaacacattttcttttcctcatttcagcctaaattaacaatggcgaaatgcaggcgaaatgtggaaaatttcctagaagcttgcagaaaaattggtgtacctcag

SEQ ID NO: 1030 - DNA, 191 bp, Homo sapiens
  full length sequence of bloodCirc_00593
gtttgttctgagtaatgaataccctattactatgatactagtatcttccttaattatcctactcattgtctcaacattctgacagttggattgagcatattcaaattttgaaaattattgtagaaatgtttttacctcatatgaaccacctgacattggaacagactttcttttcacaagtgttaccaaag

SEQ ID NO: 1031 - DNA, 223 bp, Homo sapiens
  full length sequence of bloodCirc_07174
ggaaagctatgaaaaaatgggtagagtcaattgctaagatcatcaggaggaagaagcaagctcaggcaaacggagtaagccataatattacctttgaaagtccacctccaccaattgaatggcatatcagcaaaccaggacagtttgaaacatttgatctcatgacacttcatccaatagaaattgcacgtcagctgacacttttggagtctgatctttacag

SEQ ID NO: 1032 - DNA, 431 bp, Homo sapiens
  full length sequence of bloodCirc_18626
atggaagatggtaccccaaagcatatcatccagatgacaggatttaagatggaagaaaaagaagcgctagtcaaattacttttaaaactagattgcacttttattaagagtgagaaatacaaaaattgtacacatcttatagctgaacgcctatgtaagagtgaaaaatttttagcagcttgtgcggcaggaaagtggatactaaccaaggactatataattcatagtgccaaaagtggcagatggcttgatgaaacaacttatgaatggggatataaaattgaaaaagattcccgttattcacctcaaatgcaatctgcacctaaaagatggcgtgaagaactgaaacgcactggtgctccaggagccttccacagatggaaagttgtcctccttgttagaactgataagcgaagtgattctcttataag

SEQ ID NO: 1033 - DNA, 225 bp, Homo sapiens
  full length sequence of bloodCirc_19248
gtcactctgtgagactgctgggtcagaaaaaggataatggaaggcggcttgggggagcacgattggatttgccgaagattaggaagaatccactgatagaaatcatttccatcaataccgggtgtctcaatgcttgtacctactgcaaaactaaacacgccagaggaaatttggccagttatccaattgatgaactagtagatagagccaaacaatcttttcaag

SEQ ID NO: 1034 - DNA, 375 bp, Homo sapiens
  full length sequence of bloodCirc_04914
gcaccatactggacataccttttatgtgcactgggactttttatttaccagtcactggatgctattgatgggaaacaagccagaagaacaaactcttgttcccctttaggggagctctttgaccatggctgtgactctctttccacagtatttatggcagtgggagcttcaattgccgctcgcttaggaacttatcctgactggttttttttctgctcttttattgggatgtttgtgttttattgcgctcattggcagacttatgtttcaggcatgttgagatttggaaaagtggatgtaactgaaattcagatagctttagtgattgtctttgtgttgtctgcatttggaggagcaacaatgtgggactatacg

SEQ ID NO: 1035 - DNA, 159 bp, Homo sapiens
  full length sequence of bloodCirc_04376
gagaagtctgccgttactgccctgtggggcaaggtgaacgtggatgaagttggtggtgaggccctgggcaggctgctggtggtctacccttggacccagaggttctttgagtcctttggggatctgtccactcctgatgctgttatgggcaaccctaag

SEQ ID NO: 1036 - DNA, 876 bp, Homo sapiens
  full length sequence of bloodCirc_15734
gtcagatcacttaaagaaggctacatcatgttcactcttggctacaaacatagggaagtgtgaagagtatgtggacaaagttaaggaagctttctatcaagtgttgctaaaataatggtgttctagtacaggaaacctgggaaatgtacgtgtaagtagaaacccaggactacatgatgaagccctcttcatttctaaagctgggagctcacagaagtcttggaggagcctgcaagtgtgccttcagctgggtgtgccccgtctcatcttcctaagattgctaacttcttcggttctatgggtttcccttctggtccatggggcagagatgcagctggtgccttggaacctgcaaggctcaaccttagcctagaccttagctgtgtttgtgggacatcaggagtctggcttgtggatttggaatgtccatcttttgagatggactttcttggaactcaccacttcatggacacccactgggggcaatggtagcaaagtgtgtgggtcagctgcgtgagctgtagcatgcagattccagccagcagacaacaaaagaaaacaaaaagcaaagcactcaaatcaaataccacctttgggttttctgtttttctcttgtgtatatggcagacgacaaagtcaggggtgaggggatagctgtcatataattagtgtacattgttctcatgtaaaaccatcagtccacggctgcctgttaaataattttgtctctttctttattccatttttaggccgaggagtcttgtaaatgtaatggctggaaaaaccctaacccctcacccactccccccagagccgacctgcagcaaataattgtcagtctaacagaatcctgtcggagttgtagccatgccctag

SEQ ID NO: 1037 - DNA, 577 bp, Homo sapiens
  full length sequence of bloodCirc_16067
gtatcttattgacagccggtggttcaagcagtggaagaagtatgtgggctttgacagctgggacatgtacaatgtgggtgaacataacctatttcctggcccaatagacaactctgggctattttcaggtatagtaaatgttgcttttctagctaaacattcacctgggcagtggcctgatgttatgtgcatctgtaacatggacgttgtgaactttcctagtgtgaggagatagaaacaagtatcctcattttgcatctatagcagaagtctttgcaaacccttaatgagaagttaagctacttttttcccttaaattaactgcatctgataagagtatgcttctaacattttaactttctctctttgcaaattagttctgctagctatttcacattttaagttagtatatggaatggaaagaaataggatgtcattttgaaattgtatctaaaatttaagaaccagaattttttgttacctttgcagtggaacaaattgtaaacctgtgaactttcatcaagaattcctgtgatggctgtttttatcatataactagtgtgaggagaggttgaag

SEQ ID NO: 1038 - DNA, 240 bp, Homo sapiens
  full length sequence of bloodCirc_17988
acaaaaggatgccacggagaaagaaaaaagttaaagaagtctccgaatctcggaacctggagaagaaggatgtggaaactaccagttctgtcagtgtgaagaggaagcgtagacttgaggatgcattcattgtgatatccgatagtgatggagaggaaccaaaggaggaaaatgggttgcagaaaacgaagacaaaacagtcgaatagagcaaagtgtttggccaaaagaaaaatcgcac

SEQ ID NO: 1039 - DNA, 844 bp, Homo sapiens
  full length sequence of bloodCirc_00386
gctcccagccaacctctgataaaccctcccagcggccatcagagagcacaaattgtagccctacccggaaaaggtcttcatctgagagtacttcttcaacagtaaacggagttccctctcgaagtccaagattagttgcttctggggatgactctgtggatagtctgctgcagcggatggtacaaaatgaggaccaagagcccatggagaaaagtattgatgctgtgattgcaactgcctctgcaccaccttcttccagtccaggccgtagccacagcaaggaccgaaccctgggaaaaccagacagccttttagtgcctgcagtcacaagtgactcttgcaataatagcatctcactcctatctgaaaagttgacaagcagctgttccccccatcatatcaagagaagtgtagtggaagctatgcaacgccaagctcggaaaatgtgcaattacgacaaaatcttggccacaaagaaaaacctagaccatgtcaataaaatcttaaaagccaaaaaacttcaaaggcaggccaggacagggaataactttgtgaaacgtaggccaggtcgacctcggaaatgtccccttcaggctgtcgtatcaatgcaagcattccaggctgctcagtttgtcaacccagaattgaacagagacgaggaaggagcagcactgcacctcagtcctgacacagttacagatgtaattgaggctgttgttcagagtgtaaatctgaacccagaacataaaaaggggttgaagagaaaaggttggctattggaagaacagaccagaaaaaagcagaagccattaccagaggaagaagagcaagagaataataaaag

SEQ ID NO: 1040 - DNA, 524 bp, Homo sapiens
  full length sequence of bloodCirc_20264
atgatgactttgaccagtttgataagcctggcgcggaacggtcgtggagaagaagagctgctgatgaggactgggacagtgaacttgaagatgatttacttggagaagatttgctatctggcaaaaagaatcagtcggatttgtcagatgaagagctaaatgatgatcttttgcagagtgataatgaagatgaagaaaatttcagttctcagggtgttacaattagtctgaatgctacatctggcatggttacatcatttgaactctctgacaacactaacgaccaatctggagaacaggaatctgagtatgaacaagaacaaggagaggatgaactggtttatcacaaatctgatggatcagaattgtatactcaagagtacccagaagaaggacagtatgaaggccacgaagctgagttgacagaagaccaaatagaatatgtggaagagccagaggaggagcagctttacactgatgaagtgttagacatcgagatcaatgaacctttagatgaatttaca

SEQ ID NO: 1041 - DNA, 666 bp, Homo sapiens
  full length sequence of bloodCirc_20916
aggtttgtatggtcagtgaactagaagatctcagtgcttccatagatgtccaggatgtatataccaaagtgaaatgtaaaatagagagtttcaatattgatcactatagaagcagccttggggaagagtgttggtctttggggcaatgtggaggtgtcttcctttcctgtactgacaagctgaacagacgcaccttgttggttcgacccatcagcaagcaggaccctttcagtaattgctctggcttctttccttctacaactacaaaacttctagatggcactcatcagcagcatggattcctctctctgacatacacaaaagctgtaacaaaaaatgtccgccacaagttaacatcaagaaatgagcgaagaagttttcataagttatctgaaggcctaatggatggttctcctcattttcttcatgaaattcttctttcagcacaagcttttgatattgttctttattttcctttacttaatgccattgcaagtatatttcaagcaaaactaccaaagacccaaaaagagaaaagaaaatctcctggtcagcccatgaggacccatacactgacatcccgcaatttacctttgatttatgtcaacacaagtgtaatcagaatttttattccaaaaacagaagaaatgcagccaactgttgaag

SEQ ID NO: 1042 - DNA, 246 bp, Homo sapiens
  full length sequence of bloodCirc_02796
aggaattaaggaatttgcaagagcaaatgaaggccttacaagagcagctaaaagtaacaacaattaaacagacagcaagcccagcccgtctgcaaaaatcccctgtagagaagtctccccggccacctcttaaggagaggagagttcagagaattcaggagtcaacatgcttttctgcggagcttgatgtccctgcgctaccaagaaccaagagggtggctcgaacaccaaaggcttcacctccag

SEQ ID NO: 1043 - DNA, 176 bp, Homo sapiens
  full length sequence of bloodCirc_20002
ttatcaggaactgttgccgttattacatcagatgggagaatgattgtgggaacactgaaaggttttgaccagaccattaatttgattttggatgaaagccatgaacgagtattcagctcttcacagggggtagaacaagtggtactaggattatacattgtaagaggtgacaacgt

SEQ ID NO: 1044 - DNA, 187 bp, Homo sapiens
  full length sequence of bloodCirc_12270
ctccataatgggagaagtaaagaacaaagacttaaggaacagcttggcgctcaacaagaaccagtgaagaaatccattcaggaatcagaagcttttttgcctcagagcatacctgaagagagatacaagatgaagagcaagcccctaggaatctgcctgataatcgattgcattggcaatgagacag

SEQ ID NO: 1045 - DNA, 159 bp, Homo sapiens
  full length sequence of bloodCirc_23007
agccatgggaccacaccaccaccaccacaaccaataggccaggaaccaccagagctccggcaaaacctccagggcccactgaaggtagtggattggacttggctgatgctttggatgatcaagatgatggccgcaggaaaccgggtataggaggaagag

SEQ ID NO: 1046 - DNA, 533 bp, Homo sapiens
  full length sequence of bloodCirc_09230
gtggtgtcccagcgaatcagtaccgtggatctctcgtgttacagcctcgaggaggttcctgagcatctcttctatagtcaagatattacctacctcaacttgcgacacaacttcatgcagttagaaagacccggaggcctcgatacactctacaaattttctcaactgaagggcctgaacttgtcccataataaacttgggttgtttcctatattgttatgcgagatctctaccctgactgagctcaacctttcctgtaatggatttcatgacctaccaagtcaaattggcaatctgctaaatcttcaaaccctctgtcttgatggcaactttctgactactttacctgaagaattgggaaatctacaacagctttcctccttgggaatttccttcaacaactttagtcaaattcctgaggtttatgagaaactcactatgttagatagagtggttatggcaggaaattgcctggaagtcctgaacttaggggtgctgaataggatgaaccatatcaagcatgtggatttaag

SEQ ID NO: 1047 - DNA, 278 bp, Homo sapiens
  full length sequence of bloodCirc_22401
gatttggacgtggcagagggagaggggcaggaaggttctcaacccaaggcatggggacatttaatcctgcagactattcagattctacatctacagatgtgtgtgggacaaagctagtagtttgggaagctgctcagaatggtgcagatgagggaactgaactggcatcaaatactcacaacatagctcaggatctgtcaaacaaaagttcttatggactcaaaggggcttggaagaattctgtggaagagtggacaacagaagactggactgaagat

SEQ ID NO: 1048 - DNA, 279 bp, Homo sapiens
  full length sequence of bloodCirc_07006
tgacttttttgaacgaaccattctgtgcaacagccttgtgtggagttgtgctgtgacgggtagacctggactgacgtatcaggaagcacttgagtcagaaaaaaaagcaagacagaatcttcagagttttccagaaccactaattattccagttttatacttgaccagccttacccatcgttcgcgcttacatgaaatttgtgatgatatctttgcatatgtcaaggatcgatattttgtcgaagaaactgtggaagtcattaggaacaatggtgcaag

SEQ ID NO: 1049 - DNA, 1568 bp, Homo sapiens
  full length sequence of bloodCirc_14241
tgttatagttttgccgctggactcttccctcccttcccccaccccatcaggatgatatgagacttgaaagaagacgatgcatacaggtgactcaagttttgaaatacagtaaaactctggctaagagaatgtgggaatcgatggtctattttgaatgggggaggtttctgataaatagcagttagtggggggaattgtagatcagtaaatgcaaaggtagttgggctatttgttaaacttacttttgaactcagattgataatcagtgatttatagtggtgttattacaaatacagcatagtaaatgctagcacttaggcttttcaagagctaatattttggtgggaattggaataattctgttaatgtaaataacacagtcacctttatggttgaatgcatgtctcccccagaactctattagaatatggcagatcttttatgggagtagatgttagtaggatatcatcaaaaagactgacaagttaaggatattatacccatacatacggtttcttaaaaagatatgctctgggattttgtttattttttccttgttcccaatatccctgcctcccatttcctttcttcccaccctccccctcttatccttttgtcatttgtatttttatacagaagaagcagtgtgaaggcatttttgaaagaatattttttgattgctctataattaattgaggtgatcttttacatgggaaactggaggctattccacacatggctatgttcaaatttctgaaaatgtagtgcagctaatgtataaagtgttaataacttttgaacttaaatgttcttaaattaggcatattataaggcattttgttgaactaagtgacttaacatttgaaactctgtcagagagccttatttgattatatttataaactgtttgaaaatgtgattgctaactggaaaagaaatatttatataaattttgaattgatacctaacagatgcctaattatatcattggtgtagtttttgtgattggtttttatttttggcgatctgggttttgtctaggggaaaaatcatcattttatgattttaagattttaaaaaattgtttcggtgtactattttgtatgaagaaatgtgcttgaatatatttataaattaaattagagagtatataatacttcacgttcatgtagaagtcaccattttaagaccgatgttaattcttgtttacgtcaaaggtgattgagcaatcatctctgttacgcatctatcatgcatgcacacaggcttgcacatgtatgtttgcctgtacatattagaagtatgccaggtacacattctggctgagttgctcgctgattgttaaaagcaacgtgatgctgaagctgaatatcaccatcatagaaaaacaaataggcatatttacagaaacatttttagaattttatgcacatttttttgttgtcagattttataagtttgaccttttggtgcaggaactatttctcagcattgtcagctcctggattgctccttgggcgctatactgcacattggctataccaagtagatgctcactttcgactgag

SEQ ID NO: 1050 - DNA, 421 bp, Homo sapiens
  full length sequence of bloodCirc_16836
attcagtgctcaagagtgaagaaaattctactgtctttagccacttaatgaagtacccgtgtaatacttttggaaaacctcatacagaagtcaagatcaacagaaaaactgcatttggaactacaactcttgtcttgactgattttagcaataaatccagtactttggaaagaaaaacaaagcaaaaccagatactagatgaggagtttcaaaactctcctcctgctagtgtttgtttgaatgatatacagcacccctccaagaagacaacaaacgatataactcaaccatccagcaaagtaaacatatcacctacaatcagttcagaatctaaattatttagtccagcacataaaaaaccgaaaacagcccaatactcatcaccagagcttaaaagctgcaaccctggatattctaacag

SEQ ID NO: 1051 - DNA, 374 bp, Homo sapiens
  full length sequence of bloodCirc_10887
aacaactctgctcatggtgattacatgcaaaataacgagagcagcttaatagagcaagctccaatacctcaggacggacttaccgtggcacctcacagagctcagcgagaagctgtacacattgagaagataatgttgaaaggagtccagagaaaaagagctgacaaatactgggagtacactttcaaagtaaattggtctgatctttcagtcacaacagtaacaaaaacccaccaagaactacaggaatttctactgaagcttccaaaggaactgtcttcagagacttttgacaagaccatcttaagagccctgaatcagggttccttgaaaagggaggaacggcgacatcctgacctagagcccatcctaag

SEQ ID NO: 1052 - DNA, 14282 bp, Homo sapiens
  full length sequence of bloodCirc_22986
aaacagcaaatggaagaccctgagacaggagactgcctgatacacgcaagttccagcaagagtccacggcagctaagtcacagtgagcaaggggaacaaggatgagagatgcagtcaaagaggccatcgtgagggctcttgtcggtcggccatggtaaggatttgggggcgtttcttaaaacatgatgggaagccactgaagctggggagtttgtggtgatgagatttaacaccctttaggaaggatcactctggctgttatattgaattagaagggaaggaagcaaggatgcatgcagggacaacaggtgacccttggcagtgatccaaatgtcaaataactggcttcaagcaagagtacacagagtctgggctccccgaatccttatagtcagcaaagtccttgacaactttgcaaatggatatttcataaaatacactaaatcccaagttccctacccatggcccataataaacaataatagacaatgcagaaattcagcattggacaagtatatcctatactcgggttgccatgattactgggagtccctgcatagggcataaacaccagttgttatacctgaatgtaggagcgctctcttgactcttgatggattttcccacatcactctccttttgtctgtgttacttttctgagataaaaagttggatacaattggagctctgtctcttccctgagcacttcctgtgatgagaggctcctttcattcgccactaccattctaaataccagtcaggaagcctgcagctggcagtgctccactgctttggcaagggctgggccttcatcttctgggtcagattgctttgttatttataacttcccagtaaatgcaaaatattttactaaagtagttatttttgtatctctcagatactgtaagtacctaggctttcagaagagccccacaatcagaagggagaccagatgacaacctcatatagtcccatttgcattattatttaaaactgggattcctggccagacgtggtagctcacatctgtaatcccaacactttgagaggccaaggtgggaggaccacttgagcccaggagttggagatcagtctgaaccccgtctctacaaaaaatatagaaattagccaggcgtggtggtgtgtgcctgtagtgtcagctacccaggagactgaggtggaaggatcacctgagcccaggagattgaggctgcagtgagccatgattgcaccactgcactccagcctgggtgacagagacagaccccatctaaaaaataataataataatagatttccacaaatgttagcatgcatcatcagaaatgctctgtgttcatgattgcacattgctttcacttttccaggtgccgggagcaaagagatgattaagacaccatcccaggcctcaagccccacgaaacgcaggggaagcgccatgctatgcagccagcaatcgttttaccttttaagagctctgagagagacacccactggaaaggggtgcagaggaccccagaggatcaactaacccagtgtgggagggtcagggaaagcttcatagaggccgtgacccttagggcaaatcttgagaggaagatggccaggcagaggaaatgggaaagtctgttccagcaccatatttgctagattcttggcactttatgtatagcatctcctttaatcttcacaactaccctgctgcacagcattttagaggtgaggaaactaaggctgagagagattaagttacttgcccaagggtacacagagacaaagccaggactaactcataacaaagtgggtaggttttgtttattttgcatgtcagattgcttctagaaataacagcaggcttcctattaattccaggtgaggtcctgctattttataattgtggtttgttctttcaatgccaggagcatgtggtgtatggatccccccttacaccagtactgtgcactcctcctgatgatggagagattgggagggaccacctggctaggattgctggctctcctgacaccttctcgtggcatccatgtggtttatccagttttctgaaaagtaagtaatttttaaaatactgaaatttgacagtataagaacatgttgctttttaagggatatttacatgtttatatatttttatgaatttgaagactataaatatataaatgcagtttcaggtatcatttcctataaaatatagggcctttcttttcttttcttttctttttttgagacagagtctcactctgtcacccaggctggagttcagtggcgcgatcttggctcactgcaacctctgccttccaggttcaagtgattctcgtgcttcagccttccaagtagctgggattacaggcatgcaccaccatgcctggctaattttttgtattgtttttagtagagacgggggtttcaccatgttgcccaggctggtcttgaactcctggcctcatgtgatccacctgcttcagcctcccaaagtgctggcattacagatgtgagccaccataccccgccaaatatagggcctttctatcttcatgttctgcctgtatgatctaggaaaataacaatcaattatgaaaaaatagttatttagaatcctttgttaaattattgtaagtaccctcctggacagagagtcaaaaatagaattaaaattaatttgttggacatactcttgctttcttttaaaatgtaaatgagatacaaataggggtaggttccaagtagtcattaatctttttcaaatggtggcaaatttttttaaaaaatctaaaacaaccatggtaaagttacatatccaattaataagcaagttaaaacttcacccattcaaaaacttctttactttttatttttggaatataccatattcacttttgaaatgcaggtaaacagatacaggtagctccccggcagctacttttacaacttcagagtgatgtcataactcacgaaattcccctttgtagactgaaacaaaaaattcagaaatttccaaggtgccggtgaggccctgagtcatctggctggattccacctaacgcgcctatctgtgaatgattgaagacagagctgcaaaaccagtttcagtttgtttttttttctctaaccacagcacacccaggcacttgtccaacagtttcccacgtagctcttccccatggcgtgtgacttcatgtgcgtgtcagttgggaagagctaaaagtcaaagttcacccatgtctagcagaaaaggacttgaagattttacatggactgtgtgttggtgtttatgagtccaccaggccatcttgttttgtcttatcttttcagaccgaggatttctattccttcagttttgttttctttcagcagatgggcttttgtcccccagctttgtgaaatctcacgaattgctcagcagaaagtttccaaatgacttagtggatttttatgaacatttaaaaatgaggctgaatgcggcggctcaggtctgtaatcccagcactttgggaggctgaggcgggtggatcatctgaggtcaggagtttgagaccagcctgatcaacatggtgaaaccctgtctctattaaaaatacaaaaattagctgggcgtggtggtgcgcacctgtagtcccagctacctgggaggctgaggcacaagaattgcttgaatccgggaggcggatgttgcagtgagctgagatcgtgccactgcactccagcctgggtgacagagggagactctgtctcaaaacaaaaaggacatggggggttctttttgggggtgctaaaaatgttctaaaattggtggtggtgatggatgcacatgctaaacatcactgaattgtacactttaaatgagtgaattgtatagtataaataatatcaataaagctgttacccaaaaaaatcagatgaatggaaggaagaaattggagagagggtctctattggatatttatctcagtgagtcattctgaaccttagtcccaatttatacatgctcgtaatgacagtctttctcaaagggggctttctggaggccccagccacatcactgacagataaagagtgagtctcccaatgccttcaaagttgtcagggcggtttcctgggctctagcatttgcggttctgcataaaacctgctttcacacagctcacagggctcaacggggatcccaaatcatcggtccttgtgtttcttccccatttctcaagctacagatctgagctgaactatcaatgatattaaacccctggaaaataaaaaatcctctagaatcaaccccaaacagttgacattttcgttcccagtaagagttatactcagaaaagaattgtaataaccacaaatgaaatcagccctgcactctcgcccttcatattgaggccctgggatcaatggcatcagcatcacctgggagcaaataccaaaacaagggccgcatcccagacctactgaatcccaatctacatttttcaccaagtcctcagccatcaactgcatattaactgtccacagcagctggccctacgaagtctgccttcctgcttatacctttggatgaaatgcctgagttcctagcatggaaactaacatggatctctctgattgcctcggtcaccaatgacctccaccctctacgtcactaaattcaggggacagttctcagccttgaatcctatctacagcatttgacatgcttgcttccttcttgagaacattttcatgtggcttgcagtaggttacactctcattggttttccctgtcactggtcactctgtttcagtatcatttgctggttcatctttcctgactttttaactggaatgtcctggaatgtaatccttggaccccttctatctacattcactcctttggtgatcttctctagttccatggcttcctgcatcatctccatgctaaggacctccccgctgtctatcttcaggcttgcatctccccctcagaattccagatccagaaacctaacagtcaacttgacaactctacttgcatgtccagtgagcatctcaaacttaacatgtttaaaatcaagcttccaatcttctctccagcgcctccttctccactgaatggcaactccatccttgtgtaccttgagctaaagaaacatggagtcatcattaactcctctctttctttcatatcatacttccaatcagttggcaaatcatattggctctatttcagatatatatccagaagcccaacttaaaaatgggcaggagatttgaatagacgcttcaccaaagaagagcaaagaagatacaggagtggccaacgtgcacatgaaaagatgctcaacatggttagtccttagggaaatgcaaattaaacccaccacgagaaaccatttcacacccacttggatggccataattagaaaaaaacaaaacaaaacacacacacacacacacacacagaaaataacaagtgttggtgaggatgtggagaaattagaatttttgtacattactggcaggaatataaaatggtgcagccactttgggaaacagtttggcagttccttttttttgagacggagtctcgctctgtcgcccaggctggagtgcagtggcgcgatctcggctcactgcaagctctacctcccgggttcacgccattctcctgccccagcctctcgagtagctgggactacaggcgcccacgccacgcccggctaattttttttgtatttttagtagagacggggtttcaccacgttagccaggatggtctcgatctcctgacctcgtgatccgcctgcctcagcctcccaaactgctgggattacaggcgtgagccaccgcgcccagcctggcagtttcttaagaagttaagcatcatagtaaacataggactcagttaaaaataaaaataaaagaaattacgcataaatttaccatacatcccagcaattatacaccttggcgtgtacacaagagaaatgaacgcatacatttacacgaagactcatctgtgagcatccatagcagcactattcatagtagccaaaaagtggaaacaacccaaatgtccattaactggtgaatggatcaaaaagatatggtatagatattcaaagaaatactattccataataaaaaggagtgaagtaatgatacatgctgtagcacagatgaactttgaaagcatttgctaaatgtaagaagccaatcacaaaagaccacatattgaatgactccacttatgtgaagtgtctggaatatacaaatctacagagatggaaagtggattcacagttacctggggctggtgggagaaaagaggagtgactacagatgggcacaagggaccttattggagtaatggaaatgttctgaaattggattgtggtaatggctaaataactctgtaaatctgtttaaaaatcattgaattgtgtacttaaaacaagtgaattttatcatatgtaaattatacctcaataacactgtttacaaatatccagaatatgaccacatattatgttctctaccattgtcttgttctaagccagcatcatcctcacctggctgactgtcacctggatgaccaattgtcatacagataccacctgctaagtggttgcctgacttccactcttgtctcccaagtacgtctctaacacaacagccagagtgatcctggggaatatgcaaatcagatcaggttacctctctgctcaaaactctctgttggctcctgtctccaagagaaagacaaagttcttatagtggtctttaaagcttcactaatctggcccctccttgttacctttctgagctccctgcctgctattaatacttacccccttgctggagactgcattcagtcacactggcctccttgctgctctttggtcataccaggcacatttctgccacagggcctttgcactggctattgcttctgcctggaatgttcataccccagattccttttttttaaagacagggtctagctctgtcccccaggctttagtgcagtggcatgatctcagctcactgcaacctctgccttccaagctcaagagatcctcccacctcagcctcccaagtagctgggactacaggcacatgccatcatgctcggctaatttttaaattgtttttgtagagatgaggtcccaatgatattgcccatgctagtcttgaactcctgggttcaagcgatcctcccaccttcgcctcccaaagtgttgggattacaggcgtgaacaactgaacccagtctcccagattcctaatgacttaacttacctctctcaagccctagctcaaatgtcacctggggctgtgaggctttccctggcctcttcctacattccctagcaccctttctgatttttttctttcttttttttttttgagatggagtctcactctgtctgctgggttggagtgcagtggtatgatctcggctcactgcaacctctgccttccgggttcaagcaattctcctgcctcagcctcctgagtagctgggattacaggcacctgcaactacgcccagctaattttttgtatttttagtagagacgaggtttcaccatattggccaggctggtctccatatcctgacctcgtgattcacctgccttggcctcccaaagcgctgggattacaggagtgagccaccaccacgcctggcctctgattttttttttcttttattattatactttaagttttagggtacatgtgcacattgtgcaggttagttacatatgtatacatgtgccacgctggtgcgctgcacccactaactcgtcatctagcattaggtatatctcccaatgctatccctcccccctccccccaccccacaacagtccccagagtgtgatgttccccttcctgtggccatgtgatctcattgtttaattcccacctatgagtgagaatatgcggtgtttggttttttgttcttgcgatagtttactgagaatgatgatttccaatttcatccatgtccctacaaaggacatgaactcatcattttttatggctgcatagtattccatggtgtatatgtgccacattttcttaatccagtctatcattgttggacatttgggttggttccaagtctttgctattgtgagtagtgccgcaataaacatacgtgtgcatgtgtctttaaagcagcatgatttatagtcctttgggtatatacccagtaatgggatggctgggtcaaatggtatttctagttctagatccctgaggaatcgccacactgacttccacaatggttgaactagtttacagtcccaccaacagtgtaaaagtgttcctatttctccacatcctctccagcacctgttgtttcctgactttttaatgattgccattctaactggtgtgagatggtatctcattgtggttttgatttgcatttctctgatggccagtgatgatgagcattttttcatgtgttttttggctgcataaatgtcttcttttgagaagtgtctgttcatgtcctccgcccactttttgatggtgttgtttgtttttttcttgtaaatttgtttgagttcattgtagattctggatattagccctttgtcagatgagtaggttgcaaaaattttctccaattttgtaggttgcctgttcactctgatggtagtttcttttgctgtacagaagctctttagtttaattagatcccatttgtcaattttgtcttttgttgccattgcttttggtgttttagacatgaagtccttgaccatgccttaatagagcttattcaccattgaaatacaatgccctggctgggcgtggtggctcacacctgtaatcccagcactggaggccgaggtgggtggatcacttgaggtcaggagtttgagaccagactggccaacatggtgaaacccagtctctactaaaaatacaaaaattagccaggcatggtggcatgtgcctgtaatcccagctacttgggagcccaaggccccggagaatggcttgaacccgggaggtggaggttgcagtgagccaagaccatgccactgcactacagtctgggtgacagagcaagaccatgtcaaaaaaaagaaagaaagaaagagagaaagagagagagggaaagaaagaaagaaagaaagaaagaaagaaagaaagaaagaaagaaagaaagaaaggaaagaaaggaaagaaaggaaagaaaggaaagaaaggaaagaaaggaaggaaagaaaggaaagaaagaaaagaaagaaaaagaaaagaaagaaagagaaagaaagaaatacaatgccttgctcttgctcacggggtcagagatttttgtctttttggttcacagcttatctccagcccctagaatagttctggcacacagagtgccctcaagaaatatttgttgaatgagtgcacctaagaaatttggaagagccaggaatatgacagatcaacacatacgcacatttaggtaaaagattaggccgggcacggtggctcacacctgtaatcccagcactttgggaggccgaggcgggcagatcatgaggtcaggagattgagacaatactgactaacacggtgaaaccctgtctctactaaaaatacaaaaaattagccaggcgtggtggcaggcgcctgtagtcccagctactcgggaggctgaggcaggagaatggcgtgaacccgggaggtggagcttgcagtgagccgagaccgcgccactgcactccagcctgggcgacagagcgagactccatctcaaaaaaataaaaaataaataaaaaatttttaaaaaagattgaaaacaagctcagagggagtgattgtagtttatgacaggcaaaacaatttgagagtggaaagaatgggcaattggaaaagagagagcattttttttccccagaacattttggagcttttcttctccatgtatgtagtatctttgagtaaacctcacatatactataaagtcttaggccatatatgctcaaactctattataaagctaattgttcaattgtcttataatccttccctttcttgtgtgttattttctgttttaatgttcaatagcattgttagaaagaaaaggagattaaaaaaattctatttgttcactgttttacttgccggaagaccctgcaggtacttaaggaatatagttgaaaaggttattaaaattgtttggtgattttgtggttgttgacttagttgtctgttagcatgcattacagactgtacttggctatatgttagtaattctagaagtgactctttgaaaataattttccccaaatcatatacataaacactatttgtaactcacgagttttttaaagtttatatgcatttatttttgttataattcagtggcttttagtatattcacaaagttgtgcgattatcatcattatctaattccagaatgttttcattaccccaagaaggaatccagtaccagttaatagccactctctattccaccctcttcccagcccccagccccccaaccgccacctactttctgtctctatggatctgcttatcctggacatttcacgcaaatgggaccatacaatatgtaggtttttgtgtctggcttctttcacatcatttcttttttcttaactcaagaagtaaaccatattttactaaccaaataaactatactgacctttacttaaagtacatctttagctgaatttgcataaataatttgacatttctacctgtcacaattatactccttccaacttttgtgtcaaaaattatttttgattaaccacatgcaaagcttgacattttgaaattcagatactcactgttatctacagatgaaggtcacaagatttttttttctttaaaaaaaaggaagcaaggatattttaccctagttttgtaacttatttggcaaaaaagaatttaatgaaatttcatcactagagccattgtgtttagtaaggacaaaatttaggaatgcttagaagttggatcaatttttttctcccctgtatgtctcctcccaaacatacatatcctgtggtataaaatatgtaggccgggcatggtggctcatgcctgtaatcccagcactttgggaggccaaggcaggtggattgctttgagctcaggagtttaagaccagcctgagcaaaatggtgaaaccctgtctctactaaaaatacaaaaattagctggtggctcatgcctgtagtcccaactacttgggaggctgaggccagagaattgcttgttgagctgagattgtgccactgcactctagcctgagagacagagtgagaccccatctcaaaaaatatacatatgtatgtgtgtgtatgtgcgcgtgtgtgtgggggtggtatacaattgtttgcattgcatgacttattgaaaagtaatctgttcctcacacaattccattatatctctaagctacagaattccatacttagcccatcctatgaacttcctttattccatctctgctctatcttatcactgctttatattatttgtgaacatgttttatttttttttctttaattgcccatcaagtttcctatgcaggtcttagtagtgagatttacatcccctcaaagccccaaggtttaactctaggtttggcagatgcttaatgcaattttgcaaaatagatttttacttcaaattacagtagaatttcaatatgccctcatctttgctttggttttgtacagtgatgtcacactttagaagccctgcatctaaccttaataaatgggatcaaatattactattactaatgtttcaaacccaatctccagaaaaatagatttttcaagataaattcatttcattcatgttatggaatttaaaatttaccagattaataacaaagccctgagttgggcaatcaggcaggagaaagaaaaaaagggtattcaattaggaaaagaggaagtcaaattgtccccgtttgcagatgacatgattttatatttggaaaaccccatcgtcttagcccaaaatctccttaagctgataagcaacttcagcaaagtctcaggatacaaaatcaatgtgcaaaaatcacaagcattcctatacaccaataacagacaaacagagagccaaatcatgagtgaactcccattcacaattgcttcaaagagaataaaatgcctaggaatccagcttacaagggatgtgaaggacctcttcaaggagaactacaaaccactgctcaacaaaataaaagaggacacaaacaaatggaagaacattccacgctcatggataggaagaatcaatattgtgaaaatggccatactgcccaaggtaatttatagattcaatgccatccccatcaagctaccaatgactttcttcacagaattggaaaaaaccactttaaagttcatatggaaacaaaaaagagcctgcattgccaaggcaatcctaagccaaaagaacaaagctggaggcatcacgctacctgacttcaaactatattacaaggctacagtgaccaaaacagcatggtactggtaccaaaacagagttatagaccaatggaacaggacagagccctcagaaataataccacacatctacaaccatccggtctttgacaaacctgacaaaaacgagaaatggggaaaggattccctatttaataaatggtgctgggaaaacgggctagccatatgtagaaacctgaaactggatcccttccttacaccttatacaaaattaattcaagatggattaaaggcttaaatgttagacctaaaaccataaaaaccctagaagaaaacctaggcaataccattcaggacataggcaaggacttcatgtctaaaacaccaaaagcaatggcaacaaaagccaaaattgacaaatgggatctaattaaactaaagagcttctgcacagcaaaagaaactaccatcagagtgaacaggcaacctacagaatgggagaaaatttttccaatctacccatctgacaaagggccaacatccagaatctacaaagaacttaaacaaatttacaagaaaaaatcaaacaatcccatcaaaaagtgggcaaaggatatgaacagacacttctcaaaagaagacatttatgcagccaacagacacatgacaaaatgtgtatcatcactggccatcagagaaatgcaaattaaaaccacaacgagataccatctcacaccagttagaatggcggtcattaaaaagtcaggaaaccacaggtactggagaggatgtggagaaataggaacacttttacactgttggtaggactgtaaagtagttcaaccattgtggaagacagtgtggcaattcctcaaggatctagaactagaaataccattagacccagccatcccattactgggtatatacccacaggagtataaatcatgctgctataaagacacatgcacatgtatatttattgcagcactattcacaatagcaaagacttggaaccaacccaaatgtccatcaatgatagactagattaagaaaatgtcgcacatatacaccatggaatactatgcagccatgaaaaaggatgcgttcatgtcctttgtagggacatggatgaagctggaaaccatcattctgagccaactatcacaaggacagaaaaccaaacaccgcatgttctcactcataggtgggaattgaacaatgagaacacttggacagaggttggggaacatcatacaccagggcctgtcatggggtggggagagtggggagcgatagcattaggagatatacctaatgtaaatgaagagttaatgggtgcagcacaccaacatggcacatgtatacgtatgtaacaaacctgcgtgttgtgcacatgtaccctagaacttaaagtataatttaaaaaaaaaagccctgagtcataacagtctgtgttagattgtattcttgttcaaatatttgatgaccctcccggtgggaccattgtaggataccacatcactcagatcaggcttttccatgtgatttgcaatgtccctctctttaggaagattatacatcacgatgtgtgacttgctttggtgaacatcatatgaggggagatgatgaacatcacttctgtgtggaagcttcaagagccagcaggggttttatttttggtctcttttctctcaaccagtgatacctgcaatatatcagacagaagctgatccattagctcaggttcgtcaggtccagagggaagatgacatggacgggaaccacagctgacccataatggacattaag

SEQ ID NO: 1053 - DNA, 706 bp, Homo sapiens
  full length sequence of bloodCirc_06929
gcccggattgcatttctacaaggcgaaagaaaaggtcaagagaacctgaagaaggacttagtaagaagaataaagatgttagagtatgcattaaaacaagaaagggcaaaatatcacaaattaaaatatggcacggaactgaaccaaggtgacttgaaaatgccaacctttgagtcagaagaaaccaaagacacagaggctcccacagcacctcagaatagccagttaacgtggaagcaaggcagacagcttttaagacagtatcttcaggaagtaggttatacagatacaatattagatgtacggtctcagcgggtaaggtcattacttggactatctaattcagaaccaaatggatcagtagaaacaaagaatttagaacagatcctgaatggaggtgaatctcctaagcaaaagggacaagaaataaaaaggtcctctggtgatgttcttgagacgttcaatttcttagaaaatgccgatgacagtgatgaagatgaggaaaatgacatgatcgaaggcatcccagaaggaaaagacaaacatcggatgaataaacataaaataggtaatgaaggtttagctgctgacctaactgacgatcctgatactgaggaagcactgaaagaatttgattttttagtgactgctgaagatggtgaaggagctggagaagcacggagttcgggggatggcacagaatggg

SEQ ID NO: 1054 - DNA, 186 bp, Homo sapiens
  full length sequence of bloodCirc_07056
gaaaacggacgatgtattactaagctggaaaacatggggtttcgagtgggacaaggattgatagaaaggtttacaaaagatactgcaaggttcaaggatgagttagatatcatgaagttcatttgtaaagatttttggactacggtattcaagaaacaaatcgacaatctaaggacaaatcatcag

SEQ ID NO: 1055 - DNA, 129 bp, Homo sapiens
  full length sequence of bloodCirc_19098
ttgtattccctgaatgactataaaccacccatttcgaaagcgaaaatgacccaaattactaaggcagccatcaaagctattaagttctataaacatgtggtacagagtgttgagaagtttattcagaaa

SEQ ID NO: 1056 - DNA, 361 bp, Homo sapiens
  full length sequence of bloodCirc_03734
acagtgatgtgtgttctgaaattgtgaaccatgagtctagtacttaatgatctgcttatctgctgccgtcaactagaacatgatagagctacagaacgaaagaaagaagttgagaaatttaagcgcctgattcgagatcctgaaacaattaaacatctagatcggcattcagattccaaacaaggaaaatatttgaattgggatgctgtttttagatttttacagaaatatattcagaaagaaacagaatgtctgagaatagcaaaaccaaatgtatcagcctcaacacaagcctccaggcagaaaaagatgcaggaaatcagtagtttggtcaaatacttcatcaaatgtgcaaacagaa

SEQ ID NO: 1057 - DNA, 226 bp, Homo sapiens
  full length sequence of bloodCirc_02126
tgatcaagttgttcctgcagcacagtcttcacctataaactgtgagaagagagaaaacttgttaccatttgtgggactgaataatctcggcaatacttgctatcttaatagtatacttcaggtattatatttttgtcccggttttaaatctggagtaaagcacttatttaatattatttcaaggaagaaagaagctctaaaggatgaagccaatcaaaaagacaag

SEQ ID NO: 1058 - DNA, 194 bp, Homo sapiens
  full length sequence of bloodCirc_21287
ccttcttagattcttcaaccttgcagctgttttttgacctgtatcattccatccctccttcattttcacctctggtattatcctgcttggtacagatcgcttcagtcagaagatccctgtttaacaatgcagagagggccaagtttctctctcatcttgttgatggtgttaaacgaatactggaaaacccacag

SEQ ID NO: 1059 - DNA, 626 bp, Homo sapiens
  full length sequence of bloodCirc_15062
aagcgattattggaagccatggagacatgtaaccactccctcaaaaaggaagagaggaaaagaaaccaacatagtgagtgcctaatgtgctggtatgatagagacacagagtttatctatccttctccatggccagaaaagttccctgccatagaacgatgttgtacaaggtataaaataatatccttagatgcttggcgtgtagacataaacaaaaacaaaataaccagaattgaccagaaagcattatatttctgtggatttcctactctgaaacacatcagacacaaattttttttgaagaaaagtggtgttcaagtattccagcaaagcagtcgtggagaaaacatgatgttggaaatcttagtggatgcagaatcagatgaacttaccgtagaaaatgtagcttcatcagtgcttggaaaatctgtctttgttaattggcctcaccttgaggaagctagagtcgtggctgtatcagatggagaaactaagttttacttggaagaacctccaggaacacagaagctttattcaggaagaactgccccaccatctaaagtggttcatcttggagataaagaacaatctaactgggcaaaagaagtacaaggaatttcagaaca

SEQ ID NO: 1060 - DNA, 299 bp, Homo sapiens
  full length sequence of bloodCirc_20509
gaggaacaggaattaagcctttcctggaacgctttggagagcgttgtcaagaacatagcaaagaaagtccagctcgtagcacaccccacagaacccccattattactccaaatacaaaggccatccaagaaagattattcaagcaagacacatcttcatctactacccatttagcacaacagctcaagcaggaacgtcaaaaagaactagcatgtcttcgtggccgatttgacaagggcaatatatggagtgcagaaaaaggcggaaactcaaaaagcaaacaactagaaaccaaacag

SEQ ID NO: 1061 - DNA, 160 bp, Homo sapiens
  full length sequence of bloodCirc_10756
aacttttttagaaaatatgcaccaagtgagaatgggccaaatgggattagtgctgaggtcatggacacttacgttaaaagctgtgctggatattgcgtgatcacctatatacttggagttggagacaggcacctggataaccttttgctaacaaaaacag

SEQ ID NO: 1062 - DNA, 427 bp, Homo sapiens
  full length sequence of bloodCirc_20561
attactgaatgagaaaatgtattatgaaaacttccaggagagggtctggcacgttggggaattactaactacaggagcagtcaatcatttcaccagcgagatgggagaccagatgtactctcgcctcctagatgaaaaccctaaaagaatgacacaaatccaggaaatgtgctaaaatgaagggcaataaattcataacagaagaactaggatacagaaagcaaatatgagaacactgtttttaatctttcagcagtgactgtcatggtttaaggtaagaaaaggtatttatgcgacttgatcaaataaagatccaaccttggtagtttaatattttattattgagctccccacagaaacagcagtgttcttttggcagcttttcactgaagaatgaatagaacagaggccttcaacttccagccct

SEQ ID NO: 1063 - DNA, 683 bp, Homo sapiens
  full length sequence of bloodCirc_08654
gaaaaggaccagggaaaaggagaggtccaacaatcaagatatccggagttcaggttaatgtgaaatccattatccaacatgaagaggagtttgagatgctgcataaatctatccctgtggaccctgaagaaaaaaaaaaatactgcttaacctgtcgtgtcaaagctgcacattttgatgtagagtggggggtggaagatgattctcgcctgttgctggggatttatgaacatggctatggaaactgggagttaattaaaacagacccagagcttaaattaactgacaaaattctgccggtggagacagataaaaagcctcaggggaagcagctacagacccgagcggattacttgttgaagctgctcagaaagggtctggagaagaagggggctgtgacaggtggggaagaggccaaattaaagaagcggaagcctcgggtaaagaaggaaaacaaagtgcccaggctgaaagaggagcatggaattgagctttcatctcctaggcattcagataatccatcagaagagggagaagtgaaagatgatggcttggaaaaaagtccaatgaaaaaaaaacagaagaagaaagagaacaaggagaacaaggagaaacaaatgagttctaggaaagacaaagaaggggacaaggaaagaaagaagtcaaaagataagaaagagaag

SEQ ID NO: 1064 - DNA, 295 bp, Homo sapiens
  full length sequence of bloodCirc_08778
cctgtgcacgtcgggcgtagttcggcttcacatcaacagctggctggaggtgagcttctgcctgccccacaagatccactatgcggcctccagtctgatccccccagaggccatcgaacggagcctgaaagccatccgcccctaccatgccctgctgctgctcagtgatgagaagtccttgctgggtgagcttcctattgactgctcccctgccctagtgcgggtgatcaagaccacatctgctgtgaagaacctgcagcagctagcccaagatgcggacctggccttgctgcag

SEQ ID NO: 1065 - DNA, 195 bp, Homo sapiens
  full length sequence of bloodCirc_02929
atcaatgaactgagccatgttcaaatccctgttatgttgatgccagatgacttcaaagcctattcaaaaataaaggtggacaatcacctttttaacaaagaaaacatgccgagccatttcaagtttaaggaatactgcccgatggtcttccgtaacctgcgggagaggtttggaattgatgatcaagatttccag

SEQ ID NO: 1066 - DNA, 481 bp, Homo sapiens
  full length sequence of bloodCirc_17110
attttcagctgaactctcatctctcaacactggcaaatattcataagatctaccacacccttaataagctgaacctaacagaagacattggccaagacgatcaccaaacaggaagtctgcggtcttgcagttcttcagactgctttaataaagtgatgccaccaaggaaaaagagaagacctgcctctggagatgatttatctgccaagaaaagtagacatgatagcatgtatagaaaatatgattcgactagaataaagactgaagaagaagccttttcaagtaaaaggtgcttggaatggttctatgaatatgcaggaactgatgatgttgtaggccctgaaggcatggagaaattttgtgaagacattggtgttgaaccagaaaacgtagttatgcttgtcctagcttggaaattggatgcacaaaacatgggttattttactctacaggagtggttaaaaggaatgacttctctcca

SEQ ID NO: 1067 - DNA, 239 bp, Homo sapiens
  full length sequence of bloodCirc_09420
gccatcatgcagaagggggatacaaacataaagcccatcctccaagtcatcaacatccgtcccattactacggggaatagtccgccgcgttatcgactgctcatgagtgatggattgaacactctatcctctttcatgttggcgacacagttgaaccctctcgtggaggaagaacaattgtccagcaactgtgtatgccagattcacagatttattgtgaacactctgaaagacggaag

SEQ ID NO: 1068 - DNA, 332 bp, Homo sapiens
  full length sequence of bloodCirc_04015
attcctcctgcatggaaaaactactttcaaaagattggaaggaaaaaatggaaagactaaataccagtgaacttcttggagaaattaaaggtacacctgagagcctggcagaaaaagaacggcagctctccaccatgattacccagctgatcagtttacgggagcagctactggcagcgcatgatgaacagaaaaaactggcagcgtcacaaattgagaaacaacggcagcaaatggaccttgctcgccaacagcaagaacagattgcgagacaacagcagcaacttctgcaacagcagcacaaaattaatctcctgcagcaacagatccag

SEQ ID NO: 1069 - DNA, 201 bp, Homo sapiens
  full length sequence of bloodCirc_21439
atcattcgcaaggtggttcgacagatagacttgtccagcgccgatgccgcccaggagcacgaggaggtggagctgagagggagtggcctacagccggacctgatagagggcaggaagggggcgcagatagtgaagcgggccagcctgaaaagggggaaacagtgaccccgagccgctctccttggagtagcctctcgggag

SEQ ID NO: 1070 - DNA, 440 bp, Homo sapiens
  full length sequence of bloodCirc_19011
ggcagccattctacaaaagtggaagctgtggtcagaactctgatgaaaatacagcttagagatccaggggccaaagcactcgttttctcaacgtggcaagatgtattagatattatttcaaaagctcttactgacaacaacatggaatttgcacaaatcagtcgtgttaagacatttcaggagaacctttcagcatttaaacgtgatccccaaatcaatattttgctgctgcccctgcacacaggttctaatggattaactatcattgaagcaactcatgttctcttggtggagcccatattgaaccctgcccatgagcttcaggccatagggagggtgcaccgaattggacagacaaaacctactattgtacacagattcttaattaaagcaacaatagaagaaagaatgcaggcaatgctgaaaactgctgagagaag

SEQ ID NO: 1071 - DNA, 662 bp, Homo sapiens
  full length sequence of bloodCirc_08356
ttatttctcaaactctgaggctgcggagttcacacattgaaatctgtcatctttttcagagagaaactttcggtaatgtatgtaaccttctgtaatggaagatgattgaagacaaggggcctcgtgttgctgactactttgttgtagcaggattaactgatgtttcaaagcctctagaagaagaaattcacttcaatgatgcttgtcataaagtagctaaaccaaaagaacctattacagatgtttcagttattatcaaatctcttggggaggaagtcccacaggattatatctgtattgatgttaccccaactggattgtcagctgatcttaataatggaagtcttgtggggccacagatttacctttgctatagaagaggaagagataagcctccacttacagatctgggggttttatatgactggaaagaaagattgaaacagggttgtgaaattattcagagtactccctatgggcgccccgcaaatattagtgggagtacctcatcacaaagaatttatatcacttaccgaagagcctctgaaaacatgactcagaatacgttggctgtcactgacatatgtattattatacccagtaaaggagaaagcccaccacacacgttctgcaaagtcgacaagaatctcaataacagtatg

SEQ ID NO: 1072 - DNA, 113 bp, Homo sapiens
  full length sequence of bloodCirc_09604
agttgaaactgtgggacagccagacagaagagatagcataggagtgtgtgcagaaaaacaggatggatatgactctctgcagcgggatcaagctgtgtgcattagtacaaatg

SEQ ID NO: 1073 - DNA, 1797 bp, Homo sapiens
  full length sequence of bloodCirc_13634
gtgagccctattcccagaggcaggtggtgctgaccctgtaacccaaaggaggaaacagctggctaagctcatcattgttactggtgagtgaggttgcctgggaaagctctgggcaagcttgggccaacatggagggtaactcgtttggggattgtttttacctttagtacagataacttacaagtgattatcttcctactccatgtctaaaagattggatgttgcacaggtaaccttctgaactgggagggttgagactgctctcctagaattgccacaagaatgtctgagatcatttgccatgaataaggcagagcaggtctgcttccttcttgcttctgctagctgctttctgctgggatgtggcaggtggggggctatcctgggacctggcggctatacctgtcctctcacaagctctttaacatgacctcacagcccttagagacttgttttttgagatggagtttcgctcttgttgcccagactgcagtgcaatggcacgatctcggctcaatgcaacctccgcctcccgggttcaagcaattctcctgcctcagcctcctgagtagctaggattacaggcatgcaccgccatgcctggctaattttgtattttttagtagagacggggtttctccacgttggtcagactggtctcgaactcccgacctcaggtgatctgcctgcctcggccttccaaagtgttgggattacaagcgtgagccaccgcgcccggccccgtagagactttcttagctttagtttttactgtgatctgccaagctcataggtcagctccagaaaatcctgtagtttcttccattctgcaaaatgtcgtatgaataatggtgagagtggagtgattagggttttatgaagtggatgtcaggggaagctgacagatggtgagaaggaaggaaaatcaacgcattaagaacttactatgttactgatctcaatctagacaaaatccctttttgtgtgttggggggggttttatttttgtttttgggagacaggtctcactgtgttgcccaggctggtctcaaactcctgggctcgtgtgattcaagtggtcctcctgcctcagcctcccgagtagctggaattacagatgtgtaccaccacagcctgctctgaaacctcattttatagatgaggaaattgaggctcaggaactgaaataatttgcccagggtttacacctgggaatctataaagttgatgttagaacccaggtcagtctgaccataaataccattgttcttccagacctgaccttccttgggctgttaatctccctctctaattctgatttttcttataaagttcaagaaggcctacttacttagggattcagaaaggagattcagttgaggggctgaacagggcaggtaggagttaggggtccctctgagcagtggtatttctagtgagggggactactagactgaaagataggaagaaccttcaagcaggcagaggcccaggctaaaagtgaccacaagaagaagaatacgtctgtaacacatgggatctcataaacacttgggccagtacagggtaaggacctgagtgctggcttgaagttgagaaacctaggtttttatcttctctctcaacatgtgcccttggacagtcttcatttccctatttgtaaagttggagtgcctccctgtcccctcacgtctcatgtgtgtactcctaccatgcaggtatgttacagagaatcaaatgagaaatgcaagttggaaaactttgtgaattgtaaagcagcatgaacgaaacaagaaa

SEQ ID NO: 1074 - DNA, 240 bp, Homo sapiens
  full length sequence of bloodCirc_20447
ggtcttactgaagtaacacaaagcttaaaaatggaaaatgaagagtttaagaagaggttcagtgatgctacatccaaagcccatcagcttgaggaagatattgtgtcagtaacacataaagcaattgaaaaagaaaccgaattagacagtttaaaggacaaactcaagaaggcacaacatgaaagagaacaacttgaatgtcagttgaagacagagaaggatgaaaaggaactttataag

SEQ ID NO: 1075 - DNA, 219 bp, Homo sapiens
  full length sequence of bloodCirc_09322
gcatgagccatgagcccaagtccccttcgctagggatgctttccaccgcgaccaggaccaccgccaccgtcaaccccctcaccccctcgccgctcaatggcgccctggtgcccagcggcagccccgccaccagcagcgcgctgtcggcccaggccgcgccatcctccagctttgccgccgcgctgcgcaagctcgccaaacaggcggaggagcccagag

SEQ ID NO: 1076 - DNA, 229 bp, Homo sapiens
  full length sequence of bloodCirc_20382
gtaataatagacgtggatggaatacaactagccagagatattccaatgtcatccagccatccagtttctccaaatccacaccatgggggggcagcagagatcaagaaaagccatatttcagttcttttgattctggagcttcaactaacaggaaggaaggctttggattgtctgagaacccatttgcttcacttagtcctgatgagcagaaagatgaaaagaaacttct

SEQ ID NO: 1077 - DNA, 213 bp, Homo sapiens
  full length sequence of bloodCirc_01675
cctgctcaggaagaactcagagaagatccagattttgaaattaaggaaggagaaggacttgaagagtgctccaaaatagaagtaaaagaagaaagccctcaatcaaaagcagaaacagaattaaaagcttcccaaaaaccaatcagaaaacacaggaacatgcactgcaaggtttctttgttggatgacacagtttatgaatgtgttgtggag

SEQ ID NO: 1078 - DNA, 179 bp, Homo sapiens
  full length sequence of bloodCirc_01264
tataacagaagatgaagcaaaagaagttcatcgaagcctaaagattgcagctgggatttttaaacatttaaaggaaagtcatctcccaaaactcattacacctgcggaaaaaggaagagatttagagtcacgactcatagaagcatacgttattcaatgtcaggctgaagctcaagaag

SEQ ID NO: 1079 - DNA, 1580 bp, Homo sapiens
  full length sequence of bloodCirc_09473
gggcctttacaacaactaaacggacaggcattccagccccacgggaattttcagtaactgtctcaagagagaggtctgtgccacgtggtccctccaaccccaggaaatcagtgtccagtccaacttcttccaacactcccactcctacgaaacacctgaggaccccttccacaaagcccaagcaagagaatgaaggtggagaaaaggctgcgcttgagtcccaagttcgggaacttttggcagaagccaaagcaaaagatagtgaaattaacaggcttcgaagtgaactaaagaaatacaaagagaaaaggactctgaacgctgaggggactgatgctttgggcccaaatgtcgatggaacatcagtctccccaggtgacacggaacctatgataagagctcttgaggagaagaacaagaactttcagaaagagctttccgatctagaggaagaaaaccgggtcctgaaggagaaactgatctatcttgagcactccccaaattcagaaggggcagcaagtcacactggcgacagcagctgcccaacatccataactcaagagtcaagcttcggaagcccaactggaaatcagatgtccagtgacattgatgagtataaaaaaaacatacatggaaatgcattacggacatcaggctcctcaagtagcgatgttaccaaagcttctttgtcgccagatgcttccgactttgagcacattacagcagagacaccctcaaggcccctgtcctccaccagtaacccctttaagagttcaaagtgttctactgctgggagttccccaaacagcgtaagtgaattgtccctggcttccctcacagagaagatacaaaagatggaagaaaaccaccatagcactgcagaagaactacaggctactctacaagaattatcagaccagcaacaaatggtacaggaattgacagctgaaaatgagaagctggtggatgaaaagacgattttagagacatcctttcatcagcatcgagagagggcagagcagctaagtcaagaaaatgagaagctgatgaatcttttacaagagcgagtaaagaatgaagagcccaccactcaggaaggaaaaattattgaactggagcagaagtgcacaggtattcttgaacagggccgctttgaaagagagaagctactcaacattcagcagcagttgacctgtagcttgcggaaggttgaggaagaaaaccaaggagctttagaaatgattaaacgtctgaaggaagaaaatgaaaaactgaatgagtttctagaactggaacggcataataataacatgatggccaaaactttggaagagtgtagagttaccttggaagggctaaaaatggagaatggatctttgaagtctcatttgcagggtgagaagcagaaagccacagaggccagtgctgtggagcagacggcagagagctgcgaagttcaagaaatgttgaaagtagcccgagcagagaaagatctactggaactgtcttgcaatgagctcagacaagaattactaaaggcaaacggtgaaattaaacatgtttccagtctgctggccaag

SEQ ID NO: 1080 - DNA, 423 bp, Homo sapiens
  full length sequence of bloodCirc_04559
tggttaaatgaggagaaaattatccagaggcttgtggaaatagttcatccatcgcaagaagaagatcgacattcaaatgcatcacaatcactttgtgaaattgttcgcctgagcagagaccagatgttacaaattcagaacagtacagagcccgaccccctgcttgccactctagaaaagcaagaaattatagagcagcttctatcaaatattttccacaaggagaaaaatgagtcagccatagtcagtgcaatccagatattgctgactttacttgagacacgacgaccaacatttgaaggccatatagagatctgcccaccaggcatgagccattcagcttgttcagtaaacaagagtgttctagaagccatcagaggaagacttggatcttttcatgaactcctgctggagccacccaag

SEQ ID NO: 1081 - DNA, 217 bp, Homo sapiens
  full length sequence of bloodCirc_19673
gaaagaatacccacctcatgtccaaaaagttgaaattaatcctgtaaggttaagtcggctccaaggtgttgaacgtataatgaagaaaacagaagagtccgaatcacaagtggagcctgaaattaagaggaaagtacaacagaaacgacactgtagtacctatcagcctactcctcctctatctcctgcttcaaaaaaatgtttaacccatttagag

SEQ ID NO: 1082 - DNA, 505 bp, Homo sapiens
  full length sequence of bloodCirc_15335
atcaacctctccacttctcctacacctgcacagttaataagccgttcccaggcttccagttctaccagcggcagtattacccaacagactatgttactagggagtacttcccctaccctaacggcaagccaagctcaaatgtatctccgagctcaaatgctgattttcacacccgctaccactgtggctgctgtacagtctgacattcctgttgtctcgtcgtcatcgtcatcttcctgtcagtctgcagctactcaggttcagaatttaacattacgcagccagaagttgggtgtattatctagctcacagaatggtccaccaaaaagcactagtcaaactcagtcattgacaatttgtcataacaaaacaacagtgaccagttctaaaatcagccaacgagatccttctccagaaagtaataagaaaggagagagcccaagcctggaatcacgaagcacagctgtcacccggacatcaagtattcaccagttaatagcaccag

SEQ ID NO: 1083 - DNA, 373 bp, Homo sapiens
  full length sequence of bloodCirc_14366
ctctgcttatgataatgtcaacaaagttcgagtagctatcaagaaaatcagcccctttgagcaccagacctactgccagagaaccctgagggagataaaaatcttactgcgcttcagacatgagaacatcattggaatcaatgacattattcgagcaccaaccatcgagcaaatgaaagatgtatatatagtacaggacctcatggaaacagatctttacaagctcttgaagacacaacacctcagcaatgaccatatctgctattttctctaccagatcctcagagggttaaaatatatccattcagctaacgttctgcaccgtgacctcaagccttccaacctgctgctcaacaccacctgtgatctcaag

SEQ ID NO: 1084 - DNA, 246 bp, Homo sapiens
  full length sequence of bloodCirc_01252
tgaaagccctgtgtaaggaatgtgtagtagaacgttgtcgcatattgcgtctgaagaaccaactaaatgaagattataaaactgttaataatctgctgaaagcagcagtaaagggcagcgatggattttgggtggggaagtcctccttgcggagttggcgccagctagctcttgaacagctggatgagcaagatggtgatgcagaacaaagcaacggaaagatgaacggtagcaccttaaataaag

SEQ ID NO: 1085 - DNA, 194 bp, Homo sapiens
  full length sequence of bloodCirc_22466
agtgaagatagtccaagtcctaagagacagcgcctctctcattcagtctttgattatacatcagcatcaccagctccctcaccaccaatgcgaccatgggagatgacatcaaataggcagcccccttcagttcgaccaagccaacatcacttctcaggggaacgatgcaacacacctgcacgcaacagaagaag

SEQ ID NO: 1086 - DNA, 318 bp, Homo sapiens
  full length sequence of bloodCirc_01676
cctgctcaggaagaactcagagaagatccagattttgaaattaaggaaggagaaggacttgaagagtgctccaaaatagaagtaaaagaagaaagccctcaatcaaaagcagaaacagaattaaaagcttcccaaaaaccaatcagaaaacacaggaacatgcactgcaaggtttctttgttggatgacacagtttatgaatgtgttgtggagaaacatgctaagggacaagatttgcttaaacgagtatgtgagcatctcaatcttttggaagaagactattttggtctagccatttgggataacgcaacctctaag

SEQ ID NO: 1087 - DNA, 257 bp, Homo sapiens
  full length sequence of bloodCirc_05433
gatcaactcactatcctgaaggtccattctcccaagaagaggggacagaaagacagatctatttgtaagaaaggcttgggtatcccatgaacgagccaacagaaaaccgattggggtgcagcaggactccagagccagatataaggctcagaaaagggcaccaactggatggtacacgaagaggtgataatgacagccaccaaggagatttggagcccattttagaggcatctgttctatcttcccatcataaaaaa

SEQ ID NO: 1088 - DNA, 236 bp, Homo sapiens
  full length sequence of bloodCirc_16984
acgagcaaaaatcaaattaaagtagatcttgtagatgagaattttacagaattaagaggagaaatagcaggacctccagacacaccatatgaaggaggaagataccaactagagataaaaataccagaaacatacccatttaatccccctaaggtccggtttatcactaaaatatggcatcctaatattagttccgtcacaggggctatttgtttggatatcctgaaagatcaatg

SEQ ID NO: 1089 - DNA, 1020 bp, Homo sapiens
  full length sequence of bloodCirc_18946
ccaaatttgtatcctactgtggggcttcaaacaccaggagaagtggtcgatgccaattttgggcaacatcctttcgtgtttgatatagaagactatatgcgggagtggagaaccaaaatccaggcacagatagatcgatttcctatcggagatcgagaaggagaatggcagaccatgatacaaaaaatggtttcatcttatttagtccaccatgggtactgtgccacagcagaggcctttgccagatctacagaccagaccgttctagaagaattagcttccattaagaatagacaaagaattcagaaattggtattagcaggaagaatgggagaagccattgaaacaacacaacagttatacccaagtttacttgaaagaaatcctaatctccttttcacattaaaagtgcgtcagtttatagaaatggtgaatggtacagatagtgaagtacgatgtttgggaggccgaagtccaaagtctcaagacagttatcctgttagtcctcgaccttttagtagtccaagtatgagccccagccatggaatgaatatccacaatttagcatcaggcaaaggaagcaccgcacatttttcaggttttgaaagttgtagtaatggtgtaatatcaaataaagcacatcaatcatattgccatagtaataaacaccagtcatccaacttgaatgtaccagaactaaacagtataaatatgtcaagatcacagcaagttaataacttcaccagtaatgatgtagacatggaaacagatcactactccaatggagttggagaaacttcatccaatggtttcctaaatggtagctctaaacatgaccacgaaatggaagattgtgacaccgaaatggaagttgattcaagtcagttgagacgccagttgtgtggaggaagtcaggccgccatagaaagaatgatccactttggacgagagctgcaagcaatgagtgaacagctaaggagagactgtggcaagaacactgcaaacaaaaaaatgttgaag

SEQ ID NO: 1090 - DNA, 206 bp, Homo sapiens
  full length sequence of bloodCirc_22377
ctccaaagacaacaggccctccctctgccctcccgtctgtgagctccctgcccagcaccacctcctgcactgcacttctgccgtccacatcccagcacactggcgacctgactagcagccctctctctcagcttagcagttcgctctccagccaccagagcagcctctctgcacatgcagccctctcctcgagcacgtcacacaca

SEQ ID NO: 1091 - DNA, 694 bp, Homo sapiens
  full length sequence of bloodCirc_15300
gaagttggtgaaccatctaaagaagagaaggctgtggccaagtatcttcgattcaactgtccaacaaagtccaccaatatgatgggtcaccgggttgattattttattgcttcaaaagcagtggactgtcttttggattcaaagtgggcaaaggccaagaaaggagaggaagctttatttacaaccagggagtctgtggttgactactgcaacaggcttttaaagaagcagttttttcaccgagccctaaaagtaatgaaaatgaaatatgataaagacataaagaaagaaaaagataaaggaaaagctgaaagtggaaaagaagaagataaaaagagcaagaaagaaaatataaaggatgagaagacaaaaaaagaaaaagagaaaaaaaaagatggtgaaaaggaagaatccaaaaaggaggaaactccaggaactcctaaaaagaaggaaactaagaaaaaattcaaacttgagccacatgatgatcaggtttttctggatggaaatgaggtgtatgtatggatctatgacccagttcactttaaaacatttgtcatgggattaattcttgtgattgcagtaatagcggccaccctcttccccctttggccagcagaaatgagagtaggtgtttattacctcagtgtgggtgcaggctgttttgtagccagtattcttctccttgctgttg

SEQ ID NO: 1092 - DNA, 898 bp, Homo sapiens
  full length sequence of bloodCirc_08660
gccaaattaaagaagcggaagcctcgggtaaagaaggaaaacaaagtgcccaggctgaaagaggagcatggaattgagctttcatctcctaggcattcagataatccatcagaagagggagaagtgaaagatgatggcttggaaaaaagtccaatgaaaaaaaaacagaagaagaaagagaacaaggagaacaaggagaaacaaatgagttctaggaaagacaaagaaggggacaaggaaagaaagaagtcaaaagataagaaagagaagcctaaaagtggtgatgccaaatcttcgagtaaatcaaagcgatctcagggtcctgtccatattacagcaggaagtgaacctgtccccattggagaggatgaggatgatgatctggaccaggagacattcagcatatgtaaggagaggatgaggcccgtgaaaaaggcactgaaacagctcgacaaacctgacaaggggctcaacgtgcaagaacagctggaacacacccggaactgcctgctgaaaatcggagaccggatagccgagtgccttaaagcctactcagatcaggagcacatcaaactctggaggaggaacctatggatttttgtttccaagtttacagaatttgatgctcgaaaactgcataagttatacaagatggctcataagaaaaggtctcaagaagaagaggagcaaaagaagaaagacgacgtgactgggggtaagaaaccatttcgtccagaggcctcaggctccagccgggactctctgatatctcagtcccatacctcacacaaccttcaccctcagaagcctcatttgcctgcctcccatggcccacagatgcatggacacccaagagataactacaatcaccccaacaagagacacttcagtaatgcag

SEQ ID NO: 1093 - DNA, 219 bp, Homo sapiens
  full length sequence of bloodCirc_01562
tgacctgaaaaaaatgtctggatttctagagggcttgagatgctcagaatgcattgactggggggaaaagcgcaatactattgcttccattgctgctggtgtactattttttacaggctggtggattatcatagatgcagctgttatttatcccaccatgaaagatttcaaccactcataccatgcctgtggtgttatagcaaccatagccttcctaat

SEQ ID NO: 1094 - DNA, 616 bp, Homo sapiens
  full length sequence of bloodCirc_09996
tgcagcgtaagtatgcacagatgaagatggaactaagccgagtaagaagacatacaaaagcctcttctgaaggaaaagacagtgtagtcctgcaaaacattttgaggtacattgttttgtctcagctattttgtagcagactcgtgcccccattagtgtgcctctttggaaattatcgcccacatttgtaatatagtcgccattgaaaagttaattatcctttttttagggattttgatgtcatttcttttttttttttaataaaaaggttgaactgtttttttttttctttttggtattaagtccatcttgtgttggtacattggcagagacatatgctttaaaaacttaaatatttcggaggcacatgttggactactttgttttaattaaactgctagtatttctttgtcaaggatgtttctagttttttgctttattgccttgcattctaatgcagtttgttctgtaactcgagagccagtagcattggattgatggaagtgtagggtttatgaattattgcagctgactaccatacctcacacagcgttggtgttgtgagcggcccatgaaaagccaaattaaaaatcaaggattcagtcaaactaagcag

SEQ ID NO: 1095 - DNA, 283 bp, Homo sapiens
  full length sequence of bloodCirc_10763
ttgttgaaatctataccagtgggagttggtcagatctatggctgtgataatccatggacagggggcattttcctgggagccatcctactctcctccccactcatgtgcctgcatgctgccataggatcattgctgggcatagcagcgggactcagtctttcagccccatttgaggacatctactttggactctggggtttcaacagctctctggcctgcattgcaatgggaggaatgttcatggcgctcacctggcaaacccacctcctggctcttggctgtg

SEQ ID NO: 1096 - DNA, 249 bp, Homo sapiens
  full length sequence of bloodCirc_05073
aatctttggatttgtttaatatgcggccacataggatgtggacggtatgtcagtcgacatgcttataagcactttgaggaaacgcagcacacgtatgccatgcagcttaccaaccatcgagtctgggactatgctggagataactatgttcatcgactggttgcaagtaaaacagatggaaaaatagtacagtatgaatgtgagggggatacttgccaggaagagaaaatagatgccttacagttagag

SEQ ID NO: 1097 - DNA, 284 bp, Homo sapiens
  full length sequence of bloodCirc_20330
agagaatttcccaagagatttgtgtagttatggatacagaagaagataacaaacatgtaggtcatcttcttgaagaagtgctgaaaagtgaattaaatcatgtaaaagtcacatctgaggctctgggtcatgctggcagacatcttcagcaaatcatcttagatcaatgctacaattttgtttgtgtgaatgttacaacctctgattttcaagaaacccagaagttactgagcatgcttgaagagagtagtctttgcattttatatcctgttgttgttgtttca

SEQ ID NO: 1098 - DNA, 161 bp, Homo sapiens
  full length sequence of bloodCirc_01568
gattaatgcagtatcgaatggacaagtccgaggtgatagttacagtgaaggttgtctgggtcaaacaggtgctcgcatttggcttttcgttggtttcatgttggcctttggatctctgattgcatctatgtggattctttttggaggttatgttgctaaag

SEQ ID NO: 1099 - DNA, 198 bp, Homo sapiens
  full length sequence of bloodCirc_04367
gtgaaggctcatggcaagaaagtgctcggtgcctttagtgatggcctggctcacctggacaacctcaagggcacctttgccacactgagtgagctgcactgtgacaagctgcacgtggatcctgagaacttcaggctcctgggcaacgtgctggtctgtgtgctggcccatcactttggcaaagaattcaccccacca

SEQ ID NO: 1100 - DNA, 225 bp, Homo sapiens
  full length sequence of bloodCirc_21442
gggaatgagtttcagaatattccaggggagcaggtgacagaggagcaattcacggatgagcagggcaacattgtcaccaagaagatcattcgcaaggtggttcgacagatagacttgtccagcgccgatgccgcccaggagcacgaggaggtgactgtagaggggcccctggaggatcccagtgagctggaggtcgatattgattactttatgaaacactccaag

SEQ ID NO: 1101 - DNA, 460 bp, Homo sapiens
  full length sequence of bloodCirc_15809
aattatttgtcaaagagaatcacgaattaagaatagcaggaggagcagtgagggatttattaaatggagtaaagcctcaggatatagattttgccaccactgctacccctactcaaatgaaggagatgtttcagtcggctgggattcggatgataaacaacagaggagaaaagcacggaacaattactgccaggcttcatgaagaaaattttgagattactacactacggattgatgtcaccactgatggaagacatgctgaggtagaatttacaactgactggcagaaagatgcggaacgcagagatctcactataaattctatgtttttaggttttgatggcactttatttgactactttaatggttatgaagatttaaaaaataagaaagttagatttgttggacatgctaaacagagaatacaagaggattatcttagaattttaagatacttcag

SEQ ID NO: 1102 - DNA, 150 bp, Homo sapiens
  full length sequence of bloodCirc_08775
cattccatggactttttgctatttcagtttggcctttgcacttttaagtatgactacacagattcaaagtatataacgaagtcatttaacttctatgttttcccgaaacccttcaatagatcctcaccagatgtcaaatttgtttgtcag

SEQ ID NO: 1103 - DNA, 170 bp, Homo sapiens
  full length sequence of bloodCirc_01596
ctgctcagataaagaatttgatgagccagctaggaactaagcaggactcaagcaagctacaggaaaatctgcaacagttacaacactccacaaatcagctcgccaaggaaacaaatgaattgctgaaagaattagggtccttgccccttcccttatctacttcagaacag

SEQ ID NO: 1104 - DNA, 631 bp, Homo sapiens
  full length sequence of bloodCirc_15618
ggtaaactggtccatgctaattttggtactaaaaaagattttgaggatttatacactcctgtgaatggatctatagtgattgtcagagcagggaaaatcacctttgcagaaaaggttgcaaatgctgaaagcttaaatgcaattggtgtgttgatatacatggaccagactaaatttcccattgttaacgcagaactttcattctttggacatgctcatctggggacaggtgacccttacacacctggattcccttccttcaatcacactcagtttccaccatctcggtcatcaggattgcctaatatacctgtccagacaatctccagagctgctgcagaaaagctgtttgggaatatggaaggagactgtccctctgactggaaaacagactctacatgtaggatggtaacctcagaaagcaagaatgtgaagctcactgtgagcaatgtgctgaaagagataaaaattcttaacatctttggagttattaaaggctttgtagaaccagatcactatgttgtagttggggcccagagagatgcatggggccctggagctgcaaaatccggtgtaggcacagctctcctattgaaacttgcccagatgttctcagatatggtcttaaaag

SEQ ID NO: 1105 - DNA, 6386 bp, Homo sapiens
  full length sequence of bloodCirc_04371
ctcttgggcaatgtgctggtgtgtgtgctggcccgcaactttggcaaggaattcaccccacaaatgcaggctgcctatcagaaggtggtggctggtgtggctaatgccctggctcacaagtaccattgagatcctggactgtttcctgataaccataagaagaccctatttccctagattctattttctgaacttgggaacacaatgcctacttcaagggtatggcttctgcctaataaagaatgttcagctcaacttcctgattaatttcacttatttcatttttttgtccaggtgtgtaagaaggttcctgaggctctacagatagggagcacttgtttattttacaaagagtacatgggaaaagagaaaagcaagggaaccgtacaaggcattaatgggtgacacttctacctccaaagagcagaaattatcaagaactcttgatacaaagataatactggcactgcagaggttctagggaagacctcaaccctaagacatagcctcaagggtaatgctacgattaaactccaacaattactgagaaaataatgtgctcaattaaaggcataatgattactcaagacaatgttatgttgtctttcttcctccttcctttgcctgcacattgtagcccataatactataccccatcaagtgttcctgctccaagaaatagcttcctcctcttacttgccccagaacatctctgtaaagaatttcctcttatcttcccatatttcagtcaagattcattgctcacgtattacttgtgacctctcttgaccccagccacaataaacttctctatactacccaaaaaatctttccaaaccctcccccacaccattttttatatttttatatttttcttatttatttcatgcacacacacacactccgtgctttataagcaattctgcctattctctaccttcttacatgcctactgtgcctcatattaaattcatcaatgggcagaaagaaaatatttattcaagaaaacagtgaatgaatgaacgaatgagtaaatgagtaaatgaaggaatgattattccttgctttagaacttctggaattagaggacaatattaataataccatcgcacagtgtttctttgttgttaatgctacaacatacaaagaggaagcatgcagtaaacaaccgaacagttatttcctttctgatcataggagtaatatttttttccttgagcaccatttttgccataggtaaaattagaaggatttttagaactttctcagttgtatacatttttaaaaatctgtattatatgcatgttgattaattttaaacttacttgaatacctaaacagaatctgttgtttccttgtgtttgaaagtgctttcacagtaactctgtctgtactgccagaatatactgacaatgtgttatagttaactgttttgatcacaacattttgaattgactggcagcagaagctcttttatatccatgtgttttccttaagtcattatacatagtaggcactgagaactctttatatctgaataagatatttaggaaccactggtttacatatcagaagcagagctactcagggcattttggggaagatcactttcacattcctgagcatagggaagttctcataagagtaagatattaaaaggagatacttgtgtggtattcgaaagacagtaagagagattgtagaccttatgatcttgatagggaaaacaaactacattcctttctccaaaagtcaaaaaaaaagagcaaatatagcttactataccttctattcctacaccattagaagtagtcagtgagtctaggcaagatgttggccctaaaaatccaaataccagagaattcatgagaacatcacctggatgggacatgtgccgagcacacacaattactatatgctaggcattgctatcttcatattgaagatgaggaggtcaagagatgaaaaaagacttggcaccttgttgttatattaaaattatttgttagagtagagcttttgtaagagtctaggagtgtgggagctaaatgatgatacacatggacacaaaaaatagatcaacagacacccaggcctacttgagggttgagggtgggaagagggagacgatgaaaaagaacctattgggtattaagttcatcactgagtgatgaaataatctgtacatcaagacccagtgatatgcaatttacctatataacttgtacatgtacccccaaatttaaaatgaaagttaaaacaaagtataggaatggaattaattcctcaagatttggctttaattttatttgataatttatcaaatggttgtttttcttttctcactatggcgttgctttataaactatgttcagtatgtctgaatgaaagggtgtgtgtgtgtgtgaaagagagggagagaggaagggaagagaggacgtaataatgtgaatttgagttcatgaaaatttttcaataaaataatttaatgtcaggagaattaagcctaatagtctcctaaatcatccatctcttgagcttcagagcagtcctctgaattaatgcctacatgtttgtaaagggtgttcagactgaagccaagattctacctctaaagagatgcaatctcaaatttatctgaagactgtacctctgctctccataaattgacaccatggcccacttaatgaggttaaaaaaaagctaattctgaatgaaaatctgagcccagtggaggaaatattaatgaacaaggtgcagactgaaatataaatttttctgtaataattatgcatatactttagcaaagttctgtctatgttgactttattgctttttggtaagaaatacaactttttaaagtgaactaaactatcctatttccaaactattttgtgtgtgtgcggtttgtttctatgggttctggttttcttggagcatttttatttcattttaattaattaattctgagagctgctgagttgtgtttactgagagattgtgtatctgcgagagaagtctgtagcaagtagctagactgtgcttgacctaggaacatatacagtagattgctaaaatgtctcacttggggaattttagactaaacagtagagcatgtataaaaatactctagtcaagtgctgcttttgaaacaaatgataaaaccacactcccatagatgagtgtcatgattttcatggaggaagttaatattcatcctctaagtatacccagactagggccattctgatataaaacattaggacttaagaaagattaatagactggagtaaaggaaatggacctctgtctctctcgctgtctcttttttgaggacttgtgtgtgtgtgtgtgtgtgtgtgtgtgtgtgtgttgtggtcagtggggctggaataaaagtagaatagacctgcacctgctgtggcatccattcacagagtagaagcaagctcacaatagtgaagatgtcagtaagcttgaatagtttttcaggaactttgaatgctgatttagatttgaaactgaggctctgaccataaccaaatttgcactatttattgcttcttgaaacttatttgcctggtatgcctgggcttttgatggtcttagtatagcttgcagccttgtccctgcagggtattatgggtaatagaaagaaaagtctgcgttacactctagtcacactaagtaactaccattggaaaagcaacccctgccttgaagccaggatgatggtatctgcagcagttgccaacacaagagaaggatccatagttcatcatttaaaaaagaaaacaaaatagaaaaaggaaaactatttctgagcataagaagttgtagggtaagtctttaagaaggtgacaatttctgccaatcaggatttcaaagctcttgctttgacaattttggtctttcagaatactataaatataacctatattataatttcataaagtctgtgcattttctttgacccaggatatttgcaaaagacatattcaaacttccgcagaacactttatttcacatatacatgcctcttatatcagggatgtgaaacagggtcttgaaaactgtctaaatctaaaacaatgctaatgcaggtttaaatttaataaaataaaatccaaaatctaacagccaagtcaaatctgcatgttttaacatttaaaatattttaaagacgtcttttcccaggattcaacatgtgaaatcttttctcagggatacacgtgtgcctagatcctcattgctttagttttttacagaggaatgaatataaaaagaaaatacttaaattttatccctcttacctctataatcatacataggcataattttttaacctaggctccagatagccatagaagaaccaaacactttctgcgtgtgtgagaataatcagagtgagattttttcacaagtacctgatgagggttgagacaggtagaaaaagtgagagatctctatttatttagcaataatagagaaagcatttaagagaataaagcaatggaaataagaaatttgtaaatttccttctgataactagaaatagaggatccagtttcttttggttaacctaaattttatttcattttattgttttattttattttattttattttattttgtgtaatcgtagtttcagagtgttagagctgaaaggaagaagtaggagaaacatgcaaagtaaaagtataacactttccttactaaaccgacatgggtttccaggtaggggcaggattcaggatgactgacagggcccttagggaacactgagaccctacgctgacctcataaatgcttgctacctttgctgttttaattacatcttttaatagcaggaagcagaactctgcacttcaaaagtttttcctcacctgaggagttaatttagtacaaggggaaaaagtacagggggatgggagaaaggcgatcacgttgggaagctatagagaaagaagagtaaattttagtaaaggaggtttaaacaaacaaaatataaagagaaataggaacttgaatcaaggaaatgattttaaaacgcagtattcttagtggactagaggaaaaaaataatctgagccaagtagaagaccttttcccctcctacccctactttctaagtcacagaggctttttgttcccccagacactcttgcagattagtccaggcagaaacagttagatgtccccagttaacctcctatttgacaccactgattaccccattgatagtcacactttgggttgtaagtgactttttatttatttgtatttttgactgcattaagaggtctctagttttttatctcttgtttcccaaaacctaataagtaactaatgcacagagcacattgatttgtatttattctatttttagacataatttattagcatgcatgagcaaattaagaaaaacaacaacaaatgaatgcatatatatgtatatgtatgtgtgtatatatacacacatatatatatatattttttcttttcttaccagaaggttttaatccaaataaggagaagatatgcttagaaccgaggtagagttttcatccattctgtcctgtaagtattttgcatattctggagacgcaggaagagatccatctacatatcccaaagctgaattatggtagacaaaactcttccacttttagtgcatcaacttcttatttgtgtaataagaaaattgggaaaacgatcttcaatatgcttaccaagctgtgattccaaatattacgtaaatacacttgcaaaggaggatgtttttagtagcaatttgtactgatggtatggggccaagagatatatcttagagggagggctgagggtttgaagtccaactcctaagccagtgccagaagagccaaggacaggtacggctgtcatcacttagacctcaccctgtggagccacaccctagggttggccaatctactcccaggagcagggagggcaggagccagggctgggcataaaagtcagggcagagccatctattgcttacatttgcttctgacacaactgtgttcactagcaacctcaaacagacaccatggtgcatctgactcctgaggagaagtctgccgttactgccctgtggggcaaggtgaacgtggatgaagttggtggtgaggccctgggcaggctgctggtggtctacccttggacccagaggttctttgagtcctttggggatctgtccactcctgatgctgttatgggcaaccctaaggtgaaggctcatggcaagaaagtgctcggtgcctttagtgatggcctggctcacctggacaacctcaagggcacctttgccacactgagtgagctgcactgtgacaagctgcacgtggatcctgagaacttcagg

SEQ ID NO: 1106 - DNA, 889 bp, Homo sapiens
  full length sequence of bloodCirc_17540
ccgatttattttgcatattcccagcgaggaaagagacaatgcaatccgagtgtgttttcagattgaacttgcccattggttttacttggatttctacatgcagaacacaccaggattacctcagtgtgggataagagactttgctaaagctgtcttcagtcattgtccgtttttgctgcctcaaggtgaagatgtggaaaaagttttggatgaatggaaggaatataaaatgggagtaccaacatatggtgcaattattcttgatgagacacttgaaaatgtactactagttcaggggtacctagcaaaatcaggctggggatttccaaaaggaaaagtaaataaagaagaagctcctcatgattgtgctgctagagaggtctttgaagaaactggttttgatatcaaagactatatttgtaaggatgattacattgaacttcgaatcaatgaccagcttgctcgtttgtacatcattccaggaattccaaaagacacaaaatttaacccaaaaactagaagagaaattcggaacattgagtggttctctattgagaaattgccttgtcatagaaatgatatgacccccaaatccaaacttggtttggcacctaacaaattttttatggccattccctttatcagaccattaagggactggctttctcgaagatttggcgattcctcagacagtgacaatggattttcctcaactggtagcacgccggctaaacccactgtggaaaaattgagtcgaaccaaattccgccacagtcagcagttatttcctgacggttctcctggtgaccagtgggtaaagcacaggcaaccactgcagcaaaagccatataataatcattctgaaatgtctgaccttttaaaaggaaag

SEQ ID NO: 1107 - DNA, 226 bp, Homo sapiens
  full length sequence of bloodCirc_02864
gtggttggttctagctattgccatggtacgtttttatatggaaaaaggaacacacagaggtttatataaaagtattcagaagacacttaaatttttccagacatttgccttgcttgagatagttcactgtttaattggaattgtacctacttctgtgattgtgactggggtccaagtgagttcaagaatctttatggtgtggctcattactcacagtataaaacca

SEQ ID NO: 1108 - DNA, 127 bp, Homo sapiens
  full length sequence of bloodCirc_11369
aagcctgccctggactgctcacaggtctccccgccccgtcctgccacatctcctgagaacaatgcttccctctctgacacctctcccatggacagttccccatcagggattccgaagcgtcgcacag

SEQ ID NO: 1109 - DNA, 325 bp, Homo sapiens
  full length sequence of bloodCirc_19205
gaaatggaagttccagtattaccgaaaatctctctaccgatcaccagttcttcactgcctacctttaattttagttcccctgagatcacaacttcctctccatcacccatcaattcgtctcaagcattaacaaacaaggtacaaatgacctctccgagcagcactggcagtcccatgtttaaattttcatctccaatcgtaaaatctactgaggcaaatgtactacctccatcatctattggatttacatttagtgtgcctgttgcaaaaacagcagaactttctggttctagtagtactttagaaccaattataagtagttcag

SEQ ID NO: 1110 - DNA, 359 bp, Homo sapiens
  full length sequence of bloodCirc_17131
aaacagcacttcttctcagtctcagacaagtactgcctccagaaaagccaattcaagcgttgggaagtggcaggatcgatatgggagggccgaatcacctgatctaaggagattacctggggcaattgatgttatcggtcagactataactatcagccgagtagaaggcaggcgacgggcaaatgagaacagcaacatacaggtcctttctgaaagatctgctactgaagtagacaacaattttagcaaaccacctccgtttttccctccaggagctcctcccactcaccttccacctcctccatttcttccacctcctccgactgtcagcactgctccacctctgattccaccaccgg

SEQ ID NO: 1111 - DNA, 155 bp, Homo sapiens
  full length sequence of bloodCirc_14060
ttccacttacttacatgatcatttcgagagatgtaatgttgattgctgctgttttttatgtcagataccgaactcttccaacaccacgaacacttgccaagtatttcaatccttgctatgccactgctaggttaaaaccaacattcatcagcaag

SEQ ID NO: 1112 - DNA, 251 bp, Homo sapiens
  full length sequence of bloodCirc_04999
aaaaatatgcaggaaccaattgctcttcatgagatggacactagcaatggggtgttgctgcctttctatgaccctgacaccagcatcatttacttatgtggaaagggtgacagcagtattcgctattttgagatcacggatgaatccccgtacgtccactacctcaacacattcagcagcaaggagcctcagagagggatgggttacatgcccaagaggggacttgatgttaacaaatgtgagattgccag

SEQ ID NO: 1113 - DNA, 325 bp, Homo sapiens
  full length sequence of bloodCirc_09815
ctatttcaagaagcccctgaatatctactttggatttattcctgaaataatcttcatgacctctttgtttggctatttggttatccttattttttacaagtggacggcctatgatgctcatacctctgagaatgcaccaagccttctgatccatttcataaacatgttcctcttttcctacccagagtctggttattcaatgttgtattctggacagaaaggaattcagtgtttcctggtagtggttgcactactgtgtgtaccttggatgctgctgtttaaaccattggtccttcgccgtcagtatttgaggagaaagcatttg

SEQ ID NO: 1114 - DNA, 262 bp, Homo sapiens
  full length sequence of bloodCirc_07981
attgctatgcagaaccaaatcaacacaaacccagagagtcctgacactgtgacaatacatgctgcaacaccacagtttatcattggacctggaggggtggtgaacctaacaggtctggtatcttcagaaaattcatccaaggcaacagatgaaacgggtgtatctgctgttcagtttggaaactcttctacatcagtattagctacattagctgccttagctgaagcatctgctccattgtccaattcttcagaaactccag

SEQ ID NO: 1115 - DNA, 11351 bp, Homo sapiens
  full length sequence of bloodCirc_17411
gaactacataagggagaatgttccagtgtgtcagcatttttttaattgcaaatcaattaaggacatagtatctgcatggaatgtatgtggacaagatggagcaatttgatcaggtgataatgcaattaggtgtattcgggcttgggtgaacaatcgttgtaagggtattgcttaatcaaatgatgccaataccaaaaggggttacaaattaagtatcttattgctctttatttacttattaggctttttttattaatgacttagattaagacatagaaggcttatacacataaacgtcatcattgaaacaaaggtgaggataactaatatgttgaatagcaaggctagaaataaaggtgaagaaaactacaaaaatattagttttgtaaaaaaagttattgtaggtagaaagaatgtctagaagcttagcaaattgatacttacagtgaataaatgtttagtcttgaactttgattctcaagagagatcaggactagaaagatctagtttaataccagtttgcaaagcattattttagagagttagttttcctgaagtacaatctacatgctataaaatgtatcttttttagtatattgctctcagacagtcataaccactaccacaattaagatacagccatatagcccaggctggcacggtgactcacacctgtaatcccagcactttgggaggccgaggtggttggatcatctgaggtcgggagttcgagaccagcctggccaacatggtgaaaccccgcctctactaaaaatacaaaatttagccaggcgtggtggcatgtacctgtaatcccagctactcaggaagccgaggcgggagaattgcttgaacccgggaggcggaggttgcagtgagctgagatcatgccactgcactccagcctgggtgatagagtgagactctgtctcaaaaaaaaaaaaagatacaggccatttccatcattccaaacaattccttcatgccccttttagttgactcctcctcttaccccagccactggtaacttctgactgttttctgaccccatagttttgcaaagcttccttcacgtaactttttaagaatttgatcttcataagatctctacaacattaatattatcaacagttctattttacaatagaagaaactagtgtttaaagttaaacagctttccaaaacctacactatatgagttgtggagccagaacctgagcccccattttctaacccaggatcctgaatacatcccttaacccttccagctagccccttgttccaagagctctgctcttttctgcattgttcagttacctccaggttgatcttatattaggagccagtgtttaacattcatagtaatgtactggagggacaagagcagtgtttctcaatcttttttgcattattgttcttctaaagagcgtttttagacttttttccctaatcattccttgcccccattaaattttaacaccgttaatatagtgtatatctgtatgtataatgtatgtctgtacttaatagataacccgtctttgtaatttcagcctctgaggaccagcctctcaaggcctgagaatatctatctatgactttcaactttactcatcaaaacacaaaattgtaacaaatttactgtaaagatctcagttagctgcatttgggattctattatcaggcagtacttcattctattatagaataagcgtcctaggaaatcaagcagaggaagttggcttcataggcaaaaaaaaaaggactaaagaaagcagaaacaaagaaaaagtggattggtagtttcaaagttactttccttgtatggcaggaacaggtagccaaaaatataggttaaagatcagaacagacagaaatttattattatgccaattgaaactggcctgtttcggaaattaggctatctctctctcctgatttttctggcagtccggtaacaacttggttttagttatgtggaactttagcatgggcgacttcatttctgtgtgttttttgttgttgttgttttgagacagtttctctctgtcacccaagttagaatgcagtggcgcgatcatagctcactgcagtctgcctgccaggttcaacacattctcatgctttagcctcccaagtagctgggactacaggtgcacactaccacgcccgactaagtttttatattttttggtagagacagggttttaccatgttggccagcctggtcttgaactcttggcctcaagtgatctgcccacctcagcctctcaaagtgctgggattacaggcatgagccactgctcccagttgggacttcatttttgaagtttaggctggtcatcttgggcctcgtgcaggtgcttagtccaaaacaatggcctcctataatttttatttaataattttccccttttggtcaggccaaagcctgacctattgacctaggtcaatagtgctgctttcagttgtgctgggttgcagtttcaacatgtccttcataggttatggtgtatatatgatcttgcatttctttgagtttttgtcattccagctgaaaagactgcatttgacatttgaagggtggctttatgcaagcacttggaagtttgtaaggggacacagtgtactagggagactggtactattactttcaggaggataataactgataataactctggctccttagccagagtccttataaaccaaaccaactaaaatcaaataaataaaaaaaaagctgagccagacaaggaatttacctgttttaaccaagtagcccgtttgttaatgttttgtaactgaatctctccaatacccagcatatttatctatatgcagcaagaagtgtcagcaactgcacagattccttattttcttttctgttactacattttcaaataagtagatagtaattctatcatctggcatcccaggaatgtgttaaattaaagcagagggtgctaattctataaaagagaccatgttgggaatgaagtttttggtgtcaccaaaaaaaaaaaaaaaaaaaaaagaacgcgggagcaaatgatctctcagcaaggccagctttactttctgcagaaagggtgctacttaatagctatccagccacaagagcacaccggacagaggagactgagttatttataacctgatgcatctgccctactgctgtgtccagtttccattggctggaataggacctcgcattttacactttacctgattggctattagcttaaaacattgttaattaggtaaggggaatagaacaaagaaagaaaaggaagttgcccagggatagttaaggaagcatctccaaataaggtatggcatgtactatgggctggggcttgtctagttctatccaggcatgccagagcaagctagaacagctgatttggattacatatatatatatatatatatatatatatatatacacacacacacacacacacacacacagatactatgtgtgtataaatatactatgcatataatatatactatatatatatagtctgtgtatatacacacatagaatacatagtatatatgtattctatgtgtatatatatatacacacacacacatagaatatgtagtatatatatatataatatatatatacttatatatatatatacaaccacatagtatatatatatatactaatagtggttgcaatcttatagtaagaaaatgtgactttttataatgtttgaagaagaacttccccatttctcacagaccactagtacaatttgaacaaacagtcgcattagggatgttgctaaagcttcccgctaggtgcactgtaggatctcttagattgtataaatatttgggtttgatatgagagatccaaccttgtcaagtgacccccaaaaactactgattggggaattctaactacagccttacccttccaagagaaagaagaaggcctacatatggaaaaattaagaggggcaagagtcttactacgatagggagtctcattccatgcatcttgggaaaaactccacagcatgaagttggcaacttctcgtcctgatttgcagttgaatgtctctggttgtgctagcaggcattatattcaactccgcatgtagttcacacatcaggcatgagacttgtcctttgaaatttatgttgagttgtccagtttagcagtttttgttcttagttgtagccagattttggaggaaactggaagaatttaggatccagttcagtctacagttgataataaaaactcaaaaacaatgaacagagctacaatctaattacaggtataatgtagttttcttttgaaacataatgtttctctctacagtcactcccatttctaccaaagataatcagggtaagactaatttgtttgcaaaataagtttagtctcataaaaattgccctgaggtatttacataagtgcagcaagaataacccacagaggttccttttacatttgctttagtagaattttgacaagggatctcagattgaactttttttttttttttgagacagagtttcgctcttgttgccgaggctggagtgcagtggcatgatctcggctcactgcaacctctgccttctgggttcaagcagttgttctgcctcagcctctcgagtagctgggactataggcacccaccaccatgcccagctaattttttgtatttttagtagagacagggtttcaccatgttggccaggtgggtctcgaactcctgacctcaggtgatctacctgcctcggcctcccaaagtgctgggattacaggcgtgagccaccatgccctgccagattggacttttaaaagcatcttaactctaggaagtcaaaccaatgcagacatcggactttgcctgcggcatctaatatcttgaggttcctgggcctgccaggaagtggcaactttttactcactggctataaggcagggaacccttgaagctaggcagtctatccacattttcaaataggatattccagtcaaacccttggtaatagaaccaatgtttccagttacatgatgttataaagagggcaaattcttttttttaaaagaggaactagggtcttgctctgtcacccaggctgcagtgtagtggtatgatcatagcttgctgcaccttcaaacttctaagctcaagaggtcctcccacttcagcctcctgggtagctggaaccataggcgcatgccatcatgcccagctaatttttaaaatgagggtctcactatgtcgcccagaatgatctcaaactcctggcctcaagtccacctcccacacagtcttcaaagtagttgagattgcacatgtgagccaccatgcccagcaagagcaaattcttattgaacttatgcaaataatcatagtgctgtaaaaataaaacatagtatagtttttgaatttcagaggtgtcaggtagggaggagaaacaaatgtttccatttttgtttacagaagtatcctttaccaaattgctgtaaactatggatagtttaaaagagagagaaaaaaaatgtgtccttcagtctgaaaaacaaagcattaaaagaaccagcaatatttcaaattttttaaaagctttaaaaattcataattcttcttcatcagttcatttagtctcatgtaattaattcttgctctatttgagcttagttagtagtttcacaaactcatcagtttcttcattagagttctagaaattctcacgcagtccagtgttatctcaaggttagcagaaacctgaacttgccagagttcctcccatcttttctgtgaaccgtcttgaagacacatgctttaagatcacagttgtttacagaaagcttttagaaaggcatcagaataaagcaattaactgtggacaagatttaaaatggccatgttagaaccatgatgagaatcctttataataatgatataattgacaagcaagtttggttattcctgtggtgtacaacattttaacagaaagttatgactgatagcacaacagatttatagaaatctcatatagtttttggagcacatatcaataacatatccatacaattggaactcaaagattaaacatcatttcttacttgacagtgtttccacatataatttaacatctcagataagcctaattgatttaatatttctctttgagactttaaggagcccttctggaatgttcaaaagttagtttgtgatcaaaatgacttaattttgaattcaattttgggaagtttgtcaaaaataaaagttcaaaacgcttatcaataataggatcacaaatcactgtgaataatagtcattcatttaaccaaagtcataattgtaagattttcaaaagcagttatatcattgtagaaaaccttaactcttttagtacagacgagattaagttttcctaagtaatcaataacctaagaaggaaaatatgaggcacagggattattttgataagactcagattatttgtttcctaggccagttacctagaagttctcaccattttttactaagagcagataaatactaaagaaaaccttgttttaaaacaggaaaccaaatactagttttgcatcagtgtattgttgatatcaaagctcaatttttcaccttgtaaggagactatttttttcaaagaaaataggcaattcggagagttagtagcctacgaatattcaggcaaggtaggaaagaagggagcagtaggagtcaggtgggctttaccgtctttggtatgggtgatatcttgcattgttagctttttattagccttcacaatacatttctttaaaagcaattttagaaccctatttttttttttttacatttctatttatttatttattttttgagatggagtcttgctctgttaccctggctggagtgcaacggcgtgatctcggctcactgcaacctctgcctcctgggttcaagtgatcctcgtccctcagcctcccaagtagctgggatgacaggcctgcaccaccacacccggctaatgtttgtatttttagtagagacggggtttcaccatgttgcccaatctggtctcgaactcctaacctcaggtgatccgcccacctcagcctcccaaagtgctgagattataggcatgagccaccatacccagcctctttgacatttctaaatgtcaattagaataacaatcccattctctctgcctaattcaagaggcttgggattcaagtgcacctcttagaaaacagtttttttcatctaggatatttcatataatgaccattgtaattctgaattatctttagtaagattttgccacttttgtaattctttgcagcttctgtggccataatttttattcatgagaaagtcaggtgtaccagaaggcagagtactgacatctttagaaattagggatctcatttttatgttggatcttgggtcttagagccaagatggctttggcactgaaatctcagcacacaagaaaagaagaaataaagagcccccctgcagtaataaccacttagagcaactgacggcagttaccttaaaaactgcatctttttttgccaatgactcttcagtcactgcaaaccaaaggttatgtgccctgccatagcacaaactacctgttggtaccccaaaagccaaagagatcagagtactcaattacaaaagagagcagagcccagacctgagaggaacttacacaggattctcagggctccaggaggaagacaggggacccaccccccaccacttaaaggggaggttagcagcatcttttctgtgttcctcaaggagtctcagagacatcagtaaccttcattcaggtcccttcactggtcaccatatctgtcagaagacaaaattacaacaaatttagtttaaagatctgaattggctttatttgcagttctagaatcatgcaatacttcattccattaagtagaataagtgtcccaatgagtcaaacaaggttggttttatagacagaaaaaggccttaagaaagcagaagcaaagaacaaaaagtggatcggtcattttaaagttactttccttgtatggtgggagctgggagacacaacaatagaaaaataactgtttggttaacattaggttatttcaggttaaggattaaaacaggaaacttcgctattcattccaactgaagctcctgtttgggaagttggatattttctctctttcctgattttagaaagtcagataacaacttagttttgatttggtgatgtggaattttagcatgggtgactccatttcgatttttaatctggtttgttgtgcttagtccaaaacaatggtctcctatgatttttatgtaatagccctctagattcttggttctgccctctaagtcatgatttatttttaatgaaactactcatgtttgcagctgagtagttttatcaacctgcttcctgccaatagaatttgggggtgccaacatcatcctttcattttgtatcctctctgtccctttgattccacgttggcagtgtttttgctgaaataaaactctgtgagtcttctgtggattttatagagattcacttcattataagaaaggcatatccacagatcgtttaaaaataatcccttttccatctcatgctacaatggctgagggatgatgcttttcagttcctagaggccctctgatttgatcgacaggatctgtgaggcacacccttcatcacttgaaagggacctttgcctgactgcataaaaccagcttttgatctttctgaggttttagcaaaagtctatatagtcacaccctcaactttttctatagagcttgctttcttgacagtgaatttcttaattttagtgtcttttctatttggagagtctgaaaatttttaaaatcatgtcccctttcatttttgtataagttctcccaatgtctttctttctcctcttgcattttactgtaagtggtaagaagaaactaggtggcactttcaaaccattgcttgcaaataatgttaaccgtatagctaaggctattgcttacaggttgatcttctcaagtaactataggatacaatttccctaagttttctgccaccatcacaagggtctccattgctccaatttccagtaacatattcctcatttccctctgagccctcatcagtggtgtccttaaggtccaggggtcagttaagaactggttcaaggcattttaggccttctctatgatgctgcccagtctccttccactacccagttcccaagccacttccacattttagatatttgttacagcagcatccccttcccaggtaccaaactctgtatggtagtgtaacaaattaccacacatttagtggcttaaaacaacaaacatttgctatctcacaatttctaggggtcaggaatctgggcacaacttaactgaatcatctgctcttgatcttactgtgccaaattcacagtattaactgggttgcgtttttatctaaaggctcgagtttggggaatgatttgcttccaagctcattcaagttgttggcagagttcatttctttgcagctgcatgactaaggaccctagcatcttactgtgttcttatggctgtagccccactgaagtcccatagttccctgccatgtgatcctcttacagccatctcacaacttgactgcttatatctttaaggccgatgggagaatctctcacttcagttttctgagtttcatccattgtgacacaatcatgggagcgacatcctatcacctttgccaaatcatattgatcagaagcaagtcacaggttctatctacacccaagtgtaggagaccttagggtgcgtatcccaagatagtctagtaggttaaatagtatctcctaaagatatcataatccctggaatgcgtaaatgttaccttatttggaaaacagaatctttgcagatgtgattaaggtagggatcttgagatataaggattatcctgaatttttgagggataggggagtggacatgaaatgcaatcacgtgtatccttataagaatggggtagagggagattaagcacatgtagagaaggccgtgtgatggtggagcagagagagatttgcagatgctggccctggttaaagattgatgtgatgcacctataatcaagcaatgctggcagccaccagaagctaggggaggcaaggaacagcttctcccctagagctttcacagggagtatagcccagctgacaccttgattttgccccagtgatactgattttgttcttttggcctccagaactggaagacaatactttctgttgttttaagccacttagtttatggtaatttgttacaacagcctcagaaaattaatacagataagtagtaaatgagacctaagtggtgctttttaaatgtatttctctggttattcagtgaagctaagtatcttttcataaggttattaactattctgcaacatttccaactcatgtcttttgtctctttttcttttggacttacctgttgattagtaggagttctttacatagtgtaactactaatctttgtcagttatacatgttactgaagaagtttaccagtaaattatctttttaccttgtttatgggatattctgtattcagatatattttcaactatttttattgtgaataattttaagtacattcaaaagaagagagaatagtgtaatagaccttccatgcgctcatcacttagctcaacaattatcattatttttccccagaagtattcatttctacctttaaggtttgtactttttgtgcattatctaagaaagccttaaataaagattgtgttgctattatttgtgtggctatttctgttatgaaaaccctcattctttttttacttttatataactattatgtgtaataatttttaatatattcaaagtactactggcctcagtgttcatctctatcttcttcctgaacagcctatatttttcttattcagcccaagctattgattcagaacttgggaactctccaattgccccaacaatgtcatgcatgttaccaaagagcttgttgaaaatcccatgcatccctataaggctaattattcaggagatttcaaaatacaagtctgagtcagctagcaggcactgttgtgtttactaagtaattcctctctttccctttcttgtttctagtgtgccacctgggcttgaaggcatgaaggaacaggacctgtgcaacaagataatggctaaaattctagaaaattacaataccctgtttgaagtagagtatacagaaaatgatcatctgagatgtgaaaacctggctaggcttatcatagtaaaa

SEQ ID NO: 1116 - DNA, 254 bp, Homo sapiens
  full length sequence of bloodCirc_01550
tgggtgcctgatagacatcctaggactatacagaaggaaaaggcccactttgggggataatgctgagggacactatgaaatcttggaatgatagccagtcagatctgtgtagcactgaccaagaagaggaagaagagatgatttttggtgaaaatgaagatgatttggatgagatgatggatttaagtgatctgcctacctcactttttgcttgcagcgtccatgaagcagtgtttgaggcacgagagcagaag

SEQ ID NO: 1117 - DNA, 248 bp, Homo sapiens
  full length sequence of bloodCirc_04237
attttggaaccagtactagcagtggaggactctttggaaccacaaataccacctctaatccttttggcagcacatctggctccctctttgggccaagtagttttacagctgctcctactgggactactattaaatttaaccctccaactggtacagatactatggtcaaagctggagttagcactaacataagtaccaagcaccagtgtattactgctatgaaagaatatgaaagcaagtcactagag

SEQ ID NO: 1118 - DNA, 171 bp, Homo sapiens
  full length sequence of bloodCirc_06459
gtgcagattcactttataggaacagcttcagcttcagtgatgaaaaactgaattctccaacagactctaccccagctcttctctctgccactgtcactcctcagaaagctaaattaggagacacaaaagagctagaagccttcattgctgatcttgacaaaactttagcaa

SEQ ID NO: 1119 - DNA, 404 bp, Homo sapiens
  full length sequence of bloodCirc_22388
cattgatctggtagccttgctccagaagcctgttcctcacagtcaagcctcagaagccaactcctttgaaacttcccaacagcagggctttggccaagcccttgtcttcacaaattcgcaacacaacaatcagatggcaccagggactggcagctccactgccgtcaactcctgttctcctcagagcctgtcatccgtccttggctcaggatttggagagcttgcaccaccaaaaatggcaaacatcaccagctcccagattttggaccagttgaaagctccgagtttgggccagtttaccaccaccccaagtacacagcagaatagtacaagtcaccctacaactactacttcttgggacctcaagcccccaacatcccagtcctcagtcctcagtcatcttg

SEQ ID NO: 1120 - DNA, 387 bp, Homo sapiens
  full length sequence of bloodCirc_19582
gaggaaacaccaattggaagcctccgctcaactgtaagatttataactacctgaacaggattggatgcttcttccttcatcctcgctgtagtaaaagaaaagatgctgctgattttgccatatgtatgcatgctggccgtctagatgaacaactacccaagcaaattcctttcaccatcctctcaggagatcaaggttttctggagctagagaatcaatttaagaagactcagaggccagctcatatactaaaccctcaccacttagagggagatatgatgtgtgccttgttaaatagcatatctgataccaccaaagaatgtgacagtgatgataacatgggtgccaaaaatacttcaataggagaagaatttatatccacagaag

SEQ ID NO: 1121 - DNA, 462 bp, Homo sapiens
  full length sequence of bloodCirc_02407
gaaaagaatgaaaagataaggagtctagaaaccaatattaatacagagcatgagaaaatttgtttagcctttgaaaaagcaaagaaaattcacttggaacagcataaagaaatggaaaagcagattgaaagacttgaagctcaactagagaaaaaggaccaacaatttaaagaacaagaaaagactatgtccatgttgcaacaagatataatatgcaaacaacatcatcttgaatcactagatagactcttgacggaaagcaaaggggaaatgaaaaaggaaaatatgaagaaagatgaagctttaaaagcattacagaaccaagtatctgaagaaacaatcaaggttaggcaactagattcagcattggaaatttgtaaggaagaacttgtcttgcatttgaatcaattggaaggaaataaggaaaagtttgaaaaacagttaaagaagaaatctgaagag

SEQ ID NO: 1122 - DNA, 304 bp, Homo sapiens
  full length sequence of bloodCirc_23137
gggatactgcatccaacctggggagtgctgtcgatgagctcatgagacatcagcccacccttaaaacagatgcaacgactgccatcatcaagttacttgaagaaatctgtaatcttggaagggaccccaaatacatctgtcagaagccatcaatccagaaggcagatggcactgccactgctcctcccccaaggtctaatcatgccgcagaagaagcctctagtgaggatgaggaggaagaggaagtacaggccatgcagagctttaattctacccagcaaaatgaaactgagcctaatcagca

SEQ ID NO: 1123 - DNA, 421 bp, Homo sapiens
  full length sequence of bloodCirc_13589
ataagcatggattcctggttcattcttgttctgctcggcagtggtctgatatgtgtcagtgccaacaatgctaccacagttgcaccttctgtaggaattacaagattaattaactcatcaacggcagaaccagttaaagaagaggccaaaacttcaaatccaacttcttcactaacttctctttctgtggcaccaacattcagcccaaatataactctgggacccacctatttaaccactgtcaattcttcagactctgacaatgggaccacaagaacagcaagcaccaattctataggcattacaatttcaccaaatggaacgtggcttccagataaccagttcacggatgccagaacagaaccctgggaggggaattccagcaccgcagcaaccactccagaaactttccctccttcag

SEQ ID NO: 1124 - DNA, 350 bp, Homo sapiens
  full length sequence of bloodCirc_14585
gtgctagtcctatgggagtaaatggaggtgtaggagttcaaacgccgagtcttctttctgactcaatgttgcattcagccataaattctcaaaacccaatgatgagtgaaaatgccagtgtgccctccctgggtcctatgccaacagcagctcaaccatccactactggaattcggaaacagtggcacgaagatattactcaggatcttcgaaatcatcttgttcacaaactcgtccaagccatatttcctacgccggatcctgctgctttaaaagacagacggatggaaaacctagttgcatatgctcggaaagttgaaggggacatgtatgaatctgcaaacaatcga

SEQ ID NO: 1125 - DNA, 258 bp, Homo sapiens
  full length sequence of bloodCirc_02974
atattaatatgatggatatccttacaacaccatcaatggcaaaacctagacaagattattcaagaaccccaggacaagtgttatcgcttatcagctcgttgggatttaacacaccaattgcagaaaaaaatcaagaccctgcaaacatcctttcagcctgtctgtctgaaacatcacagctttctcaaggactcgtatgccctatgtctgtagatcaaaaggacactacgccttattctagcaaattactaaaatcat

SEQ ID NO: 1126 - DNA, 308 bp, Homo sapiens
  full length sequence of bloodCirc_13436
gacacttaccgaagaaggcagatgcagaggaccatcactcgccagatgtcctttgatcttacaaaactgctggttaccgaggactggttcagtgacatcagtccccagaccatgagaagattacttaatattgtttctgtgacaggacgattactgagagccaatcagattagtttcaactgggacaggcttgctagctggatcaaccttactgagcagtggccataccggacttcatggctcatattatatttggaagagactgaaggtattccagatcaaatgacattaaaaaccatctacgaaag

SEQ ID NO: 1127 - DNA, 200 bp, Homo sapiens
  full length sequence of bloodCirc_12752
gaatagacttcaagatcaaaacagttgaattacaaggaaagaagatcaagctacagatatgggatacagcaggccaggagcgatttcacaccatcacaacctcctactacagaggcgcaatgggtatcatgctagtatatgacatcaccaatggtaaaagttttgaaaacatcagcaaatggcttagaaacatagatgag

SEQ ID NO: 1128 - DNA, 241 bp, Homo sapiens
  full length sequence of bloodCirc_21087
gtccaactggcccaccttcaacactccctctaagcacccagacctctagtggcagctccaccctatccaagaagaggcctcctcccccaccacccggacacaagagaaccctatccgaccctcccagcccactacctcatgggcccccaaacaaaggcgcagttccttggggtaacgatgggggtccatcctcttcaagtaagactacaaacaagtttgagggactatcccagcagtcgag

SEQ ID NO: 1129 - DNA, 161 bp, Homo sapiens
  full length sequence of bloodCirc_02599
tacgtagagaaatcgacactcttaatgaacgtttagctgctgaaggacaagcgattgatggagcagagctgagtaagggccaactcaaaacaaaagccagtcacagcaccagccagctctcccagaaactgaagaccacttacaaggcttccaccagcaag

SEQ ID NO: 1130 - DNA, 191 bp, Homo sapiens
  full length sequence of bloodCirc_02264
gtgttcctccaagaaaagctggttatattgaagacctggttttgatgctgcctcagaacatttgggataacctatatagcaggtatggtggaggaccagctgtcaaccatctgtacatttgtcatacttgccaaattgaggcggagaaaattgaaaaaagaagaaaaactgaattggaaatttttattcgg

SEQ ID NO: 1131 - DNA, 172 bp, Homo sapiens
  full length sequence of bloodCirc_06099
tcagaaattggctttggaaaaatggaaacctacatcaaattggaaaagcttggagagggtacatatgcaacagtatataaaggaagaagtaaattgacagagaatttggtggcattaaaagagatccgattggaacatgaagaaggtgcaccctgcacagctataagagaag

SEQ ID NO: 1132 - DNA, 499 bp, Homo sapiens
  full length sequence of bloodCirc_03159
cttcttggtgaatttttggatgaagccattaaattaattgcttgccatcatgagcagaagcaagcgtgacaacaatttttatagtgtagagattggagattctacattcacagtcctgaaacgatatcagaatttaaaacctataggctcaggagctcaaggaatagtatgcgcagcttatgatgccattcttgaaagaaatgttgcaatcaagaagctaagccgaccatttcagaatcagactcatgccaagcgggcctacagagagctagttcttatgaaatgtgttaatcacaaaaatataattggccttttgaatgttttcacaccacagaaatccctagaagaatttcaagatgtttacatagtcatggagctcatggatgcaaatctttgccaagtgattcagatggagctagatcatgaaagaatgtcctaccttctctatcagatgctgtgtggaatcaagcaccttcattctgctggaattattcatcgg

SEQ ID NO: 1133 - DNA, 260 bp, Homo sapiens
  full length sequence of bloodCirc_06939
gcccggattgcatttctacaaggcgaaagaaaaggtcaagagaacctgaagaaggacttagtaagaagaataaagatgttagagtatgcattaaaacaagaaagggcaaaatatcacaaattaaaatatggcacggaactgaaccaaggtgacttgaaaatgccaacctttgagtcagaagaaaccaaagacacagaggctcccacagcacctcagaatagccagttaacgtggaagcaaggcagacagcttttaagaca

SEQ ID NO: 1134 - DNA, 161 bp, Homo sapiens
  full length sequence of bloodCirc_17748
gatgacttgaaagtagggcatccttcacccatctgaagggaggaaatagtggcaggtgacagtctgcatgtgcagttttcagatgccttcacctgaatgacatctacctccatcaggaccccagatgtctgacagccctgtgtgacaccaagataagtaac

SEQ ID NO: 1135 - DNA, 192 bp, Homo sapiens
  full length sequence of bloodCirc_06781
cacacgtcacatggagatgggcgtcaagaagttacctctcgtaccagccgctcaggagctcggtgtagaaactctatagcctcctgtgcagatgaacaacctcacatcggaaactacagactgttgaaaacaatcggcaaggggaattttgcaaaagtaaaattggcaagacatatccttacaggcagagag

SEQ ID NO: 1136 - DNA, 158 bp, Homo sapiens
  full length sequence of bloodCirc_09698
gcaggatgtagccaatcaaatgtgcaccaagaccaaggaggagtgtgagaagcactatatgaagcatttcatcaataaccctctgtttgcatctaccctgctgaacctgaaacaagcagaggaagcaaaaactgctgacacagccattccatttcact

SEQ ID NO: 1137 - DNA, 246 bp, Homo sapiens
  full length sequence of bloodCirc_12901
gatggcccgtactttggaaccactagcaaagaagatctttaaaggagttttggtagccgaacttgtaggcgtttttggagcatattttttgtttagcaagatgcacacaagccaagatttcaggcaaacaatgagcaagaaatatcccttcatcttggaagtttattacaaatccactgagaagtctggaatgtatggaatcagagagctagatcaaaaaacatggttgaacagcaaaaattagat

SEQ ID NO: 1138 - DNA, 338 bp, Homo sapiens
  full length sequence of bloodCirc_11110
gactctgaagacctactgggtgagcaaaggcagtgcctttagtaccagcatctccaagcaagagacagagctgagcccagagatgatctccagtggctcttggcgggaccggcccttcaagccctacaacttcttggcccacggtgtcctccccgacagcggccaccttcacccgctgctcaaggtccgctcccagttccgacagatcttcctggagatggggttcaccgagatgccgactgataacttcattgagagctccttctggaactttgacgccctcttccagccccagcagcacccagcccgtgaccagcacgacaccttcttccttcgag

SEQ ID NO: 1139 - DNA, 153 bp, Homo sapiens
  full length sequence of bloodCirc_15689
ccaacagaagctgttcttccctctcctcccactgtccctgtgatccctgtcctgccagtccctgctgagaatactgtcatcctacccaccataccacaggcaaatcctcccccagtactggtcaacacagatagcttggaaacaccaacttac

SEQ ID NO: 1140 - DNA, 742 bp, Homo sapiens
  full length sequence of bloodCirc_00858
attgagtgtagaaattgacactctcagaaggagaccaaaaatcggttcttcatcccaaagacctattaaactcaaagaagcatcatattcaaatgataatcaaattattttgcagagtccttcttcaaatggaactaaaaaagacatacataaatgtgtagactttaaacctaaagatatcaaattgacaaatgctgggagcaagcttgaccatggaattaaaagccttagtagtcctaagattgccagtgatgtgaaacctaaagccgaaggccaggcaagtgaaaataaatggtctcatttacttgttcagagagagaagatgaaagaactcaagaaaggaagaaacagtaaatttagagacaattctgaaaaatgtgtcttagagaaatggaagagaaatcaattttctcaggattataactccaacaagataattaaggaacccttgggatctagaagacagaagatcagtttcaaaatccctataaaatcccgtgacaccctccagaaacttgtagaagaaaatgtcttcaacatagattctaataattcgaagactaagcaggaagaaagagaatacctggaaagctcccaggtttcattaaatgtgactaggcagaaaactgaacatttactttcagattttacatataagcggactgttcatgagtggaaacgaaaacatcattatgaccatcaagaaagtaatgattcacattctagggaaaacctaacccag

SEQ ID NO: 1141 - DNA, 503 bp, Homo sapiens
  full length sequence of bloodCirc_10248
cctggatctaaaaaatcagcaaatggatcagatgataaagccagctgcaaggaatcaaagacaggaaatctggacccgttatcttgcataagcactgcagatcttcataaaatgtatcctacaccaccatcattggaacaacatattatgggattttccccaatgaatatgaataataaagaatatggtagtatggatacaacacctggaggaactgttctagaaggaaatagttctagtataggagcgcagttcaaaattgaggttgatgagggattctgtagccccaaaccttctgaaattaaagatttttcttatgtctataagcctgaaaattgtcaaattctagtgggatgttccatgtttgcacctctaaaaactctaccaagccaatatctgccccctatcaaattgccagaagagtgtatttaccgtcagagttggactgttggaaaattggaattgctttcttcagggccttcaatgccattcatcaaagaggg

SEQ ID NO: 1142 - DNA, 596 bp, Homo sapiens
  full length sequence of bloodCirc_16838
attcagtgctcaagagtgaagaaaattctactgtctttagccacttaatgaagtacccgtgtaatacttttggaaaacctcatacagaagtcaagatcaacagaaaaactgcatttggaactacaactcttgtcttgactgattttagcaataaatccagtactttggaaagaaaaacaaagcaaaaccagatactagatgaggagtttcaaaactctcctcctgctagtgtttgtttgaatgatatacagcacccctccaagaagacaacaaacgatataactcaaccatccagcaaagtaaacatatcacctacaatcagttcagaatctaaattatttagtccagcacataaaaaaccgaaaacagcccaatactcatcaccagagcttaaaagctgcaaccctggatattctaacagtgaacttcaaattaatatgacagatggccctcgtaccttaaatcctgacagccctcgctgcagtaaacacaaccgcctctgcattctccgagttgtggggaaggatggggaaaacaagggcaggcagttttatgcctgtcctctacctagagaagcacaatgtggattttttgaa

SEQ ID NO: 1143 - DNA, 162 bp, Homo sapiens
  full length sequence of bloodCirc_06571
gttttgacctgtagcagagaaccaattctggagaacagcctcacttctttgattgaatacttacataatgcattggaacatgacatgagattaaggtttaataatgatagaatgaagaccacaataaaagagacctctacttagctcagcaattcttacctt

SEQ ID NO: 1144 - DNA, 248 bp, Homo sapiens
  full length sequence of bloodCirc_01959
ggaacacaacagtagatgagttaatgatgagactcatggctgcaatggagatcttcacagcccaacaacaggaagatataaaggacgaggatgaacgtgaagccagagaaaatgtgaagagagagcaagatgaggcctatcgcctttcacttgaggctgacagagcaaagagggaagctcacgagagagagatggcagaacagtttcgtttggagcagattcgcaaagaacaagaagaggaacgtgag

SEQ ID NO: 1145 - DNA, 889 bp, Homo sapiens
  full length sequence of bloodCirc_05880
gctgagaattttttctcgtggatctttgttttgctcttctaaaggtttgcacacactaacattttactctaaaacaactaagttgcattggaatctgatggaatatattgaaacatatccgtgacctttgaattgtaagtaataagttgtggaaagtatacttaacttgacagcattaaaaacaaattaattttggtcttatcttaagatttgactgcctatataaggtagtgactgacctatgaaagctcttttatgttgaaagcaagtgaaaaaaaactaaagccttattggtttgaggttagaacggttatttgaaaagtggatttgaaaagaactgaagctgaattattctaaaaacaaaggaatgaagctttatgacagggcacgtgaaatgtttatagtgaaaagagagaaataagtaacaattgaaaaaaacttctagaattccatttagtaacaaagaggtttttgatgaaaattgtttgggaaaaagaaaaagaaaattgtttggaaactactcttaacagcttaaaattgattatagctaaattacattgtagcaggcaacagctgaaaatcgtttaatcttaccagctggaaagtggtgatttccttttgccagaaagagaccatgttccaaaattgaattatgtgtttgcaaaatatttatgaaagtagtgaattgatctattatgtattccattttctgaattgatattcatattaccatacactaagtaacatgtggagtaagaattacttcctttcttgagtcacattaaaattgttttccattggaaatccatcatgtagatcatgtgtgctgtttgctgctaaagtgagaacaatatattatcctaaatgcttagaagcacatggaaaaaag

SEQ ID NO: 1146 - DNA, 284 bp, Homo sapiens
  full length sequence of bloodCirc_13163
ggaaaaaggagaagccaaagaagttcactagacaaccaaaaaagcaggtatcttcaccctgtgcccagaggaaagaaaaggcattggagaagtcagcttctagagatgtgtctcctttcgttatgagtatgcagaagaataagtgggatgccacaagatccttgagattcaaccaggatgcacaaagagaagacgatcaacggcgaatgactgaaattacagggcacctaataaaaatgagattgggggatctggaccgagtcaagtcaaaggaagcaaaagaa

SEQ ID NO: 1147 - DNA, 1131 bp, Homo sapiens
  full length sequence of bloodCirc_07836
gatgggaaggccattgtgactatgtggtgattacagttgtcttactactgagtttcctactgaaatcatggaggagaaacagcagattatattggctaatcaagatggtggaacagtggcaggagcagcacctaccttctttgtcatcttaaagcagccaggaaatggcaaaactgatcaaggaattttggttactaatcaggatgcctgtgctttggctagtagtgtgtcatcaccagtaaaatctaaagggaagatttgccttccagctgattgtactgtgggtggaatcactgttaccctcgataacaatagtatgtggaatgagttctatcatcgaagcacagagatgattctgaccaagcaaggaagacgcatgtttccttactgtcgttattggataacaggtttagattcaaatttgaagtatattcttgtcatggatatatctcctgtggataaccatcgttataagtggaatggtcgttggtgggaacctagtgggaaggctgaacctcatgttttggggagggttttcattcatccagaatctccttccacaggtcattattggatgcatcaaccagtatctttctataaactcaaacttaccaacaatacactggaccaagaagggcatatcatcttgcactctatgcatcgttacctgccgaggcttcatttggtgcctgcagaaaaggctgtggaggtgatacaattaaatggccctggtgtccacacttttaccttcccacagactgaattctttgcagtaacagcttatcagaacattcagattactcagctgaaaatagattacaatccatttgccaaaggctttcgggatgatgggctgaataataagccccagagagatggaaaacaaaagaacagctctgaccaagaagggaataatatttccagttcttctggtcatcgggtccgtcttacagaaggtcaggggtcagagatacaaccaggtgatttggatcctttgtcaaggggtcatgaaacatcaggcaagggtttggagaagacttcccttaatataaaacgagactttcttggtttcatggatactgattcagcacttagtgaagttcctcaattgaagcaagagatttctgaatg

SEQ ID NO: 1148 - DNA, 201 bp, Homo sapiens
  full length sequence of bloodCirc_19213
cctcttgataggagtgggatagatatcacagattttcaggccaaaagagaaaaggtggattctcaatatcctcctgttcagagacttatgaccccaaagccagtttccatagcaacaaatcgaagtgtttattttaaaccatctctgactccttctggtgaattcaggaagactaatcaaagaatagataacaagtgcagt

SEQ ID NO: 1149 - DNA, 363 bp, Homo sapiens
  full length sequence of bloodCirc_04007
gtacacctgagagcctggcagaaaaagaacggcagctctccaccatgattacccagctgatcagtttacgggagcagctactggcagcgcatgatgaacagaaaaaactggcagcgtcacaaattgagaaacaacggcagcaaatggaccttgctcgccaacagcaagaacagattgcgagacaacagcagcaacttctgcaacagcagcacaaaattaatctcctgcagcaacagatccaggttcagggtcacatgcctccgctcatgatcccaatttttccacatgaccagcggactctggcagcagctgctgctgcccaacagggattcctcttcccccctggaataacatacaaaccag

SEQ ID NO: 1150 - DNA, 195 bp, Homo sapiens
  full length sequence of bloodCirc_06028
gcttctcatcagttgaaattggaactcaattcaatgcaggaacaacttatacaggcccagaatactttaaaacaaaatgaaaaagaagagcaacaacttcaggggaacataaatgagctaaagcaatcaagtgaacagaagaaaaaacaaattgaagcactccaaggagagcttaaaattgctgttttacagaag

SEQ ID NO: 1151 - DNA, 353 bp, Homo sapiens
  full length sequence of bloodCirc_20626
gaaggatgccaattctgcgcttctcagtaactacgagatggagtctcgctctgtcacccaggctggagtacagtggcaccatccaggctcactgcaacctctgcctcccggattcaagtgattctcctgcctcagcctcccgagtagctgggactacaggtatttcagttactaactgatctgaaagagcagcgtaaagaaagtggaaagaataaacacagctctgggcaacagaacttgaacactatcacctatgaaacgttaaaatacatatcaaaaacaccatgcaggcaccagagtcctgaaattgtcagagaatttctcacagcattgaaaagccacaagttgaccaa

SEQ ID NO: 1152 - DNA, 234 bp, Homo sapiens
  full length sequence of bloodCirc_10962
gaccttttttctatcagtgcttatgtttatgctcagaaaccacaaatggacattcacagtttcgaaggcacatttaccagggaagacagtgacccgcccattcatgaaagtctcagcatagaaaatacattgtgggcaagcaccattgttgcatcaggtactgtaataggtgttgtcatttataccggaaaagagactcgaagtgtaatgaacacatccaatccaaaaaataag

SEQ ID NO: 1153 - DNA, 249 bp, Homo sapiens
  full length sequence of bloodCirc_13660
ataatgagcttcagtccccaagatctgcgaagacgtttgtgggtgatttttccaggagaagaaggtttagattatggaggtgtagcaagagaatggttctttcttttgtcacatgaagtgttgaacccaatgtattgcctgtttgaatatgcagggaaggataactactgcttgcagataaaccccgcttcttacatcaatccagatcacctgaaatattttcgttttattggcagatttattgccatg

SEQ ID NO: 1154 - DNA, 258 bp, Homo sapiens
  full length sequence of bloodCirc_15338
atcaacctctccacttctcctacacctgcacagttaataagccgttcccaggcttccagttctaccagcggcagtattacccaacagactatgttactagggagtacttcccctaccctaacggcaagccaagctcaaatgtatctccgagctcaaatgctgattttcacacccgctaccactgtggctgctgtacagtctgacattcctgttgtctcgtcgtcatcgtcatcttcctgtcagtctgcagctactcag

SEQ ID NO: 1155 - DNA, 226 bp, Homo sapiens
  full length sequence of bloodCirc_07828
ttattaccccattcaagttgacaactgaggcaacgcagactccagtctccaataagaaaccagtgtttgatcttaaagcaagtttgtctcgtcccctcaactatgaaccacacaaaggaaagctaaaaccatgggggcaatctaaagaaaataattatctaaatcaacatgtcaacagaattaacttctacaagaaaacttacaaacaaccccatctccagacaaa

SEQ ID NO: 1156 - DNA, 397 bp, Homo sapiens
  full length sequence of bloodCirc_17980
tcttcccaagggattgttgaagaaacttctgaagagggaaactctgtacctgcttcacaaagtgttgctgctttgaccagtaagagaagcttagtccttatgccagagagttctgcagaagaaatcactgtttgtcctgagacccagctaagttcctctgaaacttttgaccttgaaagagaagtctctccaggtagcagagatatcttggatggagtcagaataataatggcagataaggaggttggtaacaaggaagatgctgagaaggaagtagctatttctaccttctcatccagtaaccaggtatcctgcccgctatgtgaccaatgctttccacccacaaagattgaacgacatgccatgtactgcaatggtctgatggaggaagatacag

SEQ ID NO: 1157 - DNA, 203 bp, Homo sapiens
  full length sequence of bloodCirc_14085
gaagtgtttggattgtgagctatttcagaactgttctcaggactcattattttaacatttgggagaaacacagccagaagatgcacacttgactgaaggaggacagggaatctgaagactccggatgacatcagagctacttttcaacagccttctcaattttctttctcagaaagcagaggctcagagcttggagacagacg

SEQ ID NO: 1158 - DNA, 1132 bp, Homo sapiens
  full length sequence of bloodCirc_21017
aattatagtgaacattattcacaacacttccgattaccatccaaaagttttgcgatttttgaatgtggcttttgatggcacaggcgactgcttaattgctggggaccaccaaggaaatatttatgtttttgacttacatggaaacaggttcaatcttgttcagcgaacagcacaagcttgcacagctctggcctttaatcttcgtaggaaatctgaattccttgtggcattagctgattattctattaaatgttttgatacagtcaccaaggagctagttagctggatgagaggacatgaatcatcagtattttcgatctctgtgcatgcatcagggaaatatgccatcacaacttcttctgatacagcacaattatgggacttggatacctttcagagaaaaagaaagctgaatattcgccagtctgtgggtatacagaaggttttctttctaccattaagtaataccatcctcagctgttttaaagataattccatttttgcctgggaatgtgacacacttttttgcaaatatcaattgccagctccacctgaaagctctagtatattatacaaagtgtttgctgtaaccagagatggccgaatcctggctgctggaggcaagtcaaatcatcttcatttgtggtgcttggaagctaggcagctctttagaattatccagatgcccactaaagttcgagccattcgccatctggaatttcttcctgatagttttgatgctggttctaatcaggttcttggagtactaagtcaagatggtattatgagatttatcaatatgcagacttgtaaacttctctttgagattgggagcctcgatgaaggaattagctcatcagcaattagcccacatggacggtacattgcatctattatggaaaatggaagtctaaacatatattcagttcaggctttaacacaagaaataaataagccacctccgcctttagtgaaagttattgaagatttgcccaagaataaactgagttccagtgatcttaagatgaaagtaacatcagggagagtacagcagccagcaaaatctagggaaagcaaaatgcaaactagaatattaaaacaagacctgactggtgattttgaaagtaaaaag

SEQ ID NO: 1159 - DNA, 141 bp, Homo sapiens
  full length sequence of bloodCirc_15597
gtgaagcatccggttactgggcaatttctatatcaggacagcaactgggccagcaaagttgagaaactcactttagacaatgctgctttccctttccttgcatattctggaatcccagcagtttctttctgtttttgcgag

SEQ ID NO: 1160 - DNA, 971 bp, Homo sapiens
  full length sequence of bloodCirc_17066
gctgtattcatcaccaaagaaaaaacttacaccaatgcagaaatcggttagtccattagtttggtgcaggcaagttttggattacccaagtcctgatgttgagtgtgctaaaaaatctcttatccacaaacttgatcaaactatgtcagctctcaagaggcagaatttatataataatcctttcaactctatgagttacaccagtccttacagtccaaatgccagtagcccatacagcagtggcttcaattctccatcctcaaccccagtgcgacctcctatagtcaaacagcttatacttcctggaaattcaggtaacttgaaaagctcagacagaaatcctccactcagtcctcagtcctctatagatagtgagttaagtgcttcagaattagatgaagattcaattggatccaattataagctaaatgatgtaactgatgtacagattctagcccggatgcaggaagaaagtctccggcaagaatatgcagccaccacgtctcggcgcagttctggttcatcttgcaattctacaagacggggtacttttagtgatcaggaacttgatgcacaaagtttagatgatgaagatgacaatatgcatcatgcagtataccctgctgttaacaggttttcaccatcaccacgcaattcacctcgaccgtcacctaagcagtcacccagaaattcacctcgttcacgatctcctgctcggggaatagaatatagtagagtgtccccacagcctatgattagccgcttacagcaacctcgcctttcacttcaaggccatcccacagatttacagacaagcaatgttaaaaatgaagaaaaactaagacgcagtcttccaaacctgtcccgaacatctaatacacaagttgactcagtgaaaagcagcagaagtgactcaaattttcaagtgccaaacggaggaatacctcgtatgcaacctcaggcttcagcca

SEQ ID NO: 1161 - DNA, 157 bp, Homo sapiens
  full length sequence of bloodCirc_10120
cactcctggaaaaagtcagatggatctgcggaaactgcttagaaaagtcgatgtagagaggagcccaggtggaacccctcttaccaataaggaaaatatggaaacaggaacaggactgactccagtgatgacgcaggccttaaggagaaagtttcag

SEQ ID NO: 1162 - DNA, 211 bp, Homo sapiens
  full length sequence of bloodCirc_13524
tgtgggaattttgctgtcctcgtggatcttcatatcttgccacaaggttcaaacaaagatacaagctggttttctgaacagaagaaagaggaagtctgtttactgttaaaagaaaccattgattcaagagttcaggagtacttggaagttcgcaaacagcacaggccatcaaatgcagaattcacaagatccaatcccttgtccttaaaag

SEQ ID NO: 1163 - DNA, 136 bp, Homo sapiens
  full length sequence of bloodCirc_21766
agagacatctccccatacatttcaattagacttattcttcaacaatgtaagcaaaccaagtgcccctgttttcgataggttgggaagcctggaatatgatgagaatacttccatcatctttagacctaactcaaag

SEQ ID NO: 1164 - DNA, 175 bp, Homo sapiens
  full length sequence of bloodCirc_13231
caaagaatggctcaagaagtactgacacatttaaaggagcatcctgatgcttggacaagagtcgacacaattttggaattttctcagaatatgaatacgaaatactatggactacaaattttggaaaatgtgataaaaacaaggtggaagattcttccaaggaaccagtgcgaag

SEQ ID NO: 1165 - DNA, 258 bp, Homo sapiens
  full length sequence of bloodCirc_14042
tggaaggaggcaaaaccggaagaccttatggattcaaaacttagatgtgtgtttgaattgccagcagagaatgataaaccacatgatgtagaaataaataaaattatatccacaactgcatcaaagacagaaacaccaatagtgtctaagtctctgagttcttctttggatgacaccgaagttaagaaggttatggaagaatgtaagaggctgcaaggtgaagttcagaggctacgggaggagaacaagcagttcaag

SEQ ID NO: 1166 - DNA, 255 bp, Homo sapiens
  full length sequence of bloodCirc_16116
ctggaagagcctgtattgtcctcacaatagtatagaagaattcaagagaggagagagagacagcaccgaatgaagactgtaaaagaaaagaaggaatgccagagattgagaaaatctgccaagactaggagggtaacccagaggaaaccgtcttcagggcctgtttgctggctatgccttcgagaacctggggatcccgaaaaattaggggaatttcttcagaaagacaatatcagcgtgcattatttctgtctt

SEQ ID NO: 1167 - DNA, 345 bp, Homo sapiens
  full length sequence of bloodCirc_21279
gcagacaccacccatcctttaaccaagcacagaaaaatagcctcttcttttcgcgattcatcattatttgatatcttcacactttcctgcaatttactaaaacaggcttcaggaaagaatctaaacttgaatgatgaaagtcagcatggcttgctcatgcaactgctcaagctcactcataactgcctcaactttgacttcatcggcacttccactgatgagtcctcagacgacctgtgtacagtgcagattcccaccagctggagatcagccttcttagattcttcaaccttgcagctgttttttgacctgtatcattccatccctccttcattttcacctctg

SEQ ID NO: 1168 - DNA, 49119 bp, Homo sapiens
  full length sequence of bloodCirc_03652
agcatgttactctgaggtttctgaagcaccagcaaatggattaagtaaaggtctggggattttcgacagacaaattggtaaaagttggaggtggccagcaggcagaaaaagaagacctttagattgtgagtataaaatgttcatgatccttccagaactacagggttacttactgacatactatgtgtgtgacacagtttgctagagaaacaaaccaaccataaataattgtaggcataataaagggtgagactatcatgagtttcctcacagtggtgctgtggtcagaaagagatattcaatatgattgtcaccattctggctagcatttagtaattaggcttgtcattacttttggggatgatcataatgtggagtgtcattagggaggggaaaactttatgaatgtttggatacttagggttttttgtttttttaaaataactctgggagtttctaatattgtttatattttgctatcaggacctcacagatccgtacttttaacaagcatgaatgaatttgtaacttagattccagaaccctgcctggcagatggcctggtggatagggccatctgtgtccattacacagatacaaattattctttctctactggctctccctgtcctttgctaaatttgagaaagtaaccttaaaaaagtgaggttcttttctcaaccatacggcacattgcagtattgtgcttttatcaggacactttgtattgcaaatgatagaaacccaactcaggttagtttaagtcaaaaaggtcattttgtgggtttatgaactcggaagttcagagcataaaatgaggttctaacatgacaggatccaggagttttaactgatatcatcaggaatgtttccttctttccatcggtaagcattttgttgtacttttggctttgttctttggcaggtatgatggtaaagatggtcagtggcatctgttgcccggctggagtgcaatggcacaatctcggctcactgcaaccttagcgtcccgggttcaagcaattctcctgcctcagcctcccaagtagctgggattacaggcgcctgccaccacatctggctaatttttttgtatttttagtagagatggagtttcaccatgttggccaggctggtctcgaactcttgacctcaggtgatccacttgcctcagcctcccaaagtgctaggattataggtgcgagccaccgcgcccagcctagacttgtatcattcttaaagtccagaatcccagaaggaggcatgtgtctctttcctttttttgagaccgagtctcgctctgtcgcccaggctggagtgcagtggtgtgatcttggcttactccaaactctggcttctaggttaaagtaattctcgtgcctcagcctcttgagtagctggcaccacaggcgtgtgctaccaaacctggctaattttttgtatttttagtagagaaggggttttgccatgttgcccaggctggtatcaaactcctgaactcaagcagtccactcttggcttccgaaagtggtgggactactggcatgagctgcggcacctggcctgatgtgtctctttctgtatagtaccagccaaactgagtggatagaaggacattggccaggcctgggtcatgtggcccatccctgagccagtcagtatggccagtggagtgtggttctctgacttgaccagggacaagtgcccgcttttggagaggggcttaagatcagccttcacttaagggcttgaaggagaagagtggttcttcaaatgaaaattggatgctgttatctaacagaaatggatataggttaggcaaaaattgataaatattctaaccatgaatctagatctaattttgaagaaattgactgacttgggccatgtggtgggttgaattgtgtcccccaaaaagatacaatgaagtcttaacctccagtgcctgtgaattttagcttatttatacataaggtctttgcagttaaaattaagatgaagtcatactatattagggtggcccctaatccaacaagtgataactccagaagaagggggaaatgaggatacagacacggaagatggaggcagggattagagttacactgccacaagccaaggaatgccaaggattgccaaggattgctggcaaccaccggaagctaggaagaaacaaggaaggattcttttctagagcctttggagggagcatggccatgccaataccttggtttctgacttctagcctctagaatcgcaatgttgttttcagccagttacccagtttgtggtagtgtgttccagcagtcctagaaagctaatacagactatatttggcacatgctgaaatttaattttgggtaagtccatcgttttgaaataaaatgctgaccataagttttcccggtggatatcttcagaaaatgtgatgttactttgtggttggttatatttatggaactttacattttagtctatagttacagtttagctgaacctgtgttcctagttgatggacagctaaacatttcttagtgtgtcctactcagcagtcatgtgtgaaaactaatagaagaaataaagtgaaacgcctacagtaaatacatgccaatatcctgagtataaaagaaagagtatgtttggggcagttagctgttgaggtaaggacagttagtattttggtgagtctaagcaaaaagttaataacttgaacgatatttctgggttctagttcattttcagcaaacagagttggataacacctttaaggttggctggactttgaaaaaaacgtaatgaatattcttttggtttctaatttatagaaagtgggtatcttcttgttctgtaattttgttcagaacctttgtggtgtgacaaattcatttttgaggaacctaagactactggaaaaacagatttaggagacctatgcaagtacttttaaatacatatgctttcccttccagccccactaaaattcactaaaatgaaataacagtaagtaaagaaaatgtcataagttcgtagtgatgaatgcagtaagcttcttctaacacttataaatatttttgacagtggtagtgtgagtgtgggaaaacaaaatctgtttttcctctgctcacaccatattacaataatcacaatcttcaacacagaacagttctgtgaccaaacgtgggttttttcccccaccaataagcaggcattcaattctgcagtggacactaggtgagtctcttctcttctcttttctctttctttttttttgagacagggtgtctcactctgtcacccaggctggagttcagtggcatgatcacagctcactgcatcctccacctcctgggttcaagtgattctcctgcctcaggtgcctgagtagctggggttacagatgtgtgccatcacacccggctaatttttgtatttttagtacagatggggtttcgccatgttggccaggctggtcttgagtgatctgcctactttggcctcccaaagtgctgggattgcaggtgtgagtcactgcgcccaaccaaggtaggtgtcttctaactcaattccaacactatctacctggagataccatcagatcccacatgtaaggtctccatctctaagactgaccctcctccttcagacagcaatcttaagtctgggcttctggaacttcttaatggctgtcttcaagttggggttcccataactccctctttgcatttgattactttgctagagtagcccacaaaactcagggaagcacttatttacagttactggtttattataaatgatattacaaagatacaggtgaagagatgcatagggcaaggcatggaggaaggggcacagagctttcatgccctccctgggcacactactctccaggagcctccacatgttcaggtatttggaagctctccaaacccagtccttttaagtttttatgggaggcttcgttacatagacatgatttttttttcttttctttgtttttgagatagcgtctcactttgttgcccaggctggagtgctgtggcataaccttggctcactgcagcctcgatctgaagcagtcctcccacctcagcctcctttgtagctgggactataggtatgcaccaccatcctcggccaatttttctattttttgaagagatggggtttcaccatattacccaggctggtctcaaactcctgacctcaggtgatccgcccgcctcagcctcccaaagtgctgggattacaggcatgcatcaccaagtccagccacgtaggcatgattggtaaactattggccattggtgatcaacttaaccttcagcccttttcccttctccagagtttggaaggtgggttgcaagtctcaaccctctaatcctgtcttggtcttcctggtggccagctcctatcctcaagctacctaggaattgccagcccccgtcaactcattggtgtacaaaaagacaacactttgtagtctctaaggattttaggagttaaagagggtccaagaccaaatatgtatttcagaatatcacaagtatcttttttaaagtttagtaatatgttttctttcttttcttttcttttttttttttttgaaacagagttttgcccttgtggcccaggctggagtgtagtggcatgatctcagctcactgcaacctctgcctcctgggttcaagcaattctcctgcctcagcctcccaggtagctgggattacaggcacccaccaccacatgcccggctaatttttgtatttttaggagagatggggtttcaccatgttggccaggctggtctcatactcctgacctcaagtgatctgcccacctcagcctcccagagtgctgggattagagatgtaagccaccatgcccagccgaagtaatatgttttctttttctgtttttttttttttttgtgatggagtctcactctgttgctcaggctggagtgcagtggtgtgctctcagctcactgcaacctccgcctccttgtttcaagtgattctcctgcctcagcctcctgagtagctgggattacaggcatgcaccaccacacttggctaatttttgtagttttagtagagacggggtttcaccatgttggccagcctggtctcgaactcctgacctcaagtgatctacccacctcggcctcccaaagtgctgggattacaggtgtgagctaccatgcctggtccatcttgtgaattttctgattttttcacattcagaattcattttctgggaattgattctaaaagtttgattgcattgttagtgctgtggaaacgtgaagtgtgtggattgggatagcatgatcaggtttttctgaggttgacctttttcaagaaagcatagactggtgttgtgcagtctttaaactgctttaaaggagtttagaaaagttgctcaaattttgcccaaaggcttggtcttgtatttaccttaggcgtttgctaaaatactttttctctagtaagtttaagttgatatttttggtttgatttagtatgttctacagaatgctagttgccttctttcatgatgctatcttttgtctctaacctgcctattttgtcttttgtttttggcactttattctttctgtatcagttagcattatgtttactgaatgttggaggaactgttctgagcttgttggtaggaatgtcactttgtatgtttacattctgatgtgaaacacctgtccctgagcagttatgtttctacagctaatgatgccattaaatattaacttggcagtagtttatgaaccttatcgcctaatttcttaaggtccaatatcttagaaactccggaagcacatcataaaatacacaacagagattaaaggttataagaataaatgtgcccaactaagaagggaccaataggtagaagaatgaggataggaaataatgacacagaggacagtccaacattctgagagccaagttgaaaaggaagtagatactcaagtaatgactcatagatggtaatccaaaatgttctctgtcaaataaaggtgtattgactttcagttgatttttcaaacaaggaaaaatccttatttgctttggggacagtctttgtttagatggtgtggttggattgtatttttattcactgagccaaatgttctgtgaacatctttactagctaccaagcactatatggggatatggtgatgtgcaaagcagactctgttcctgctcgcatggcacttagaatataatgggaaaaacagggacatcagttacacaaggaaccagataaaagctctgaaaagagacgttgttctctgcatgtatgtatggtcatgcacctcataacaatgtttcagtcaacaacagaccacatatatgacagtaatcttgtaagattataatactgtatttttactataccttttctgtgtttaggtatgtttagatatacacatacttaccattgtgttaccattgccgacagcattcagtacagtgacatgctataggtttgtagcttgctagcaatagcctaggtgtgtagtagggtataccatctaggtttgtgtaagtacaccctatgatgttcacacaacaacacacctattggcatatttctcagaccatatccttgttgttaagcagctcaagactataattgtgtgtgagttgtgggggtggattggagtaatagaaactcagaagaatttctgagaaaagaaaatttaatttgagagacgagagattagtaggtgttaattaactatgggaaggaggtaggggaaatgtggttggtagaaaggactataggatatcaacgtatattttcagaagacagaaaaagcaaagttagatcttaatttccctcttaagactcattctggtttatataaaaatttatattttcgtctcaccatttgatgtacttaaacatgcctttatgaggttcagttttgactgtggactgttaggctgttttaaaaaaaattagggaaactgaaaattggaagggggcactggatgagtatattgttaaaattttatgggaagaaaagatacaattatacctaggcactagatatttctgtaaatccatagctgtacagttgctcccattggagaagcatgaaggcattcttaggcagacattctgtcagtttctatctctctctttccaaaatcaaataggagtgatttttttatcgtgtttaattgagatgcaattaaaatgtacagtagttatgacagttgtatacacccctatggccatcacccaaaacaagaaatagaacacttctgagccaggcgcggtggctcacgcctgtaatcccagcactttgggaggctgaggtgggcggatcacctgaggtcaggagttcgagaccagcctggccaacatggggaaccctgtctctattaaaaatacaaaaattagtcgggtgtggtggcaggtgcctgtaatcctagccacttgggaagttgaggcaggagaattgtttgaacccaggaggcagaggttgcagtgagctgagatcgcgccattacactccagcctgggcaacaagagcgagactctgtctcaaaaaaaaaaaaaaaaaaaggaaaaagaaatagagcactgccagcctccttgaaggtttgctaatatccttttctggccaatctcttactgccacagtaactgattcctatcattataaattagtttgcctgcatctggagttcatataaaaggaactacacagtatgtttctttctttgtcagacttttgcttaaacctaatgtttgtatgtggtgctctatttattaacagttcattccttttttagcggatttactgaaatattcatatagcatatatttcacccatttaaagcgttgtacaattcaattacatttttactgtattcacagagttgtacacccgttacatgatcaaattttagaatagccactcctcattctgtctccttcccttaccccagccataggcaattattagtatactttgtctctattcatttgcctattctggacattagttcattcttttctatttctggatagtatttccttgtacggctatacctcagttcgtttatccattcttttgctgatgagcatttcggttgtttgggggctgttataaataatgctgctataaacatttttgtacaagtctttttgtggaccattattcatttctcttgggtacatacctagaagtggaattgctgggtcctaggttggagatagatgtatgtttaattttataagaaattgccaaataaccctttcttttggagatggagttttgctcttgttgcccaggctagagtgcaatggcccgatttcggctcactgcaacctcccaggttcaagcaattctcctgcctcagcctccctagtagctcggattacaggcgcacactaccacacccagctaattatttgtatttttagtagagacggggttttactaagttggccaggctggtctcgaactcctgacctcaggtgatctgcctgccttggcctcccaaagtgttgtgattacagacttcagccaccgtgcccagccccaaacaattcttgaaagaggttgtgccaccactttacattcccaccaacaatgtatgagagattggtttttccacattttgccagatttttcgtatttgtcagtcttttctattactattattttttttgagatggagtttcactcattgcccaggctggggtgcagtggcgcaatctcggctcaccgcaacctccgtctcccaggttcaagcgattcacctgcctcagcctcccgagtagctgggattacaggcatgctcccctcagcctcccaaagtgctgggattgtattttgagtagaaatggggtttctccatgttggtcaggctgatgtcgaactcccgacctcaggtgatccacccgtctccgcctcccaaagtgctgggattatgggcgtgagccactgtgcccggacagtcttttctgttttaaatattggccaggtgcgttgggcttcacctgtaaccccagtactttgtcaggctgaggtaggaggatcatttgagtccaggagtttgagaccagcctgggcaacatatggagatcttgcctccccaaaacatttaaaaattagttgggtgtggtggcatgtaccaatagtcccagctactcagaagactgaggtgggaggatcgcttgagctgaggagattaaggctgcagtgagctgtgatcataccactacattccagcctgggtgacagagtgaaattctgtctcaaaaatatatttataagctgaatgtggtggctcacatctgtaatccctttgggaggccaaggcgggaaggcgggaggatgacttgagcccaggagttcaagactagcctggataacatagcaaaacctcatctctattttatatgtatagatatatatttaatctacttaatatgtaaaaatcatacaatatgtttatgtataaatatatataaattttagaatattttgtctgttttttcaagatagcctactggaattttaacaacgatgatgttgaatatattaatttttttttctttttttgagttggagtctctctcttgttgctcaggctagagtacaatggcatgatcttggctcactgcaacctccgcctcccgggttcaggcggttctcctgcctcagcctcccgagtagctgggattacaggcatgcaccaccgtgcctggctaattttgtatttttagtagagacggagtttctccatgtttgtcaggctggtctcgaactcccgacctcaggtgatccacccgcctcggcctcccaaagtgctgggattacaggcgtgagccaccgcaccgggccgaatatatcaatttaatggggatggatgtcctaataatattgagttttccagtatgccataaggagtgattacttttttcttttcttttcttttcttttttttttttttgagatggagtcttgcactgttgttcaggctggagtgcagtggcatgatctcagctcattgcaacctccgccttccaggttcaagtgattctcctgcctcagcttcccgagtagctgggattacaggcgcatgccaccacccccggctaattttttgtatttttagtagagacggggtttcactgtgttagccaggctggtctcaaactcctgaactcgtgatgcacctgcctcggcctccgaaagtgctgggattacaggcgtgagccactcttcctggtcggagtggttactttttaaaagtcatcaaattcttaagataaaggactgaaattacagtgtagttttaggtcactgtcagaaaaacctagtctaacctttcgtatcagatcagattcccccagcagtattatactattctttcatagcacttttaatgatttttaattttgtatttataaccatttcattattgtccatctcctccaagttttaagcctcttgatgatagggaccgtcatctgtcttgtttagcattgtatcctagcaaataggttaatctgacacacagtgggtgtccagtaagttgctggatagatgaattaattgttggtttttgttgttgttgttttttgagagagtctcactctatcacctaggctggagtacagtggtacaatcttggcttactgcatcctttgcctcccaggttcaaatgattctcccacctcagcctccagagtagctgggattacaggcaaccgccatcatgcccagctaatttttatatttttagtagatacggggtttcaccatgttggctaggctggtctcaaagctcgcaacctcaagtgatccccccgcttcggcctcccaaagtgctgggattacaggagtgagctactgtgcctggcctgtttttttgtttgttttggcggggggtcagagttgtgctctgtcactcagggtggagtgcagtggcctgatctcggcccattacagcctccaccttctgggttcaagtgattcttgtgcctcagcctcctgagtagctggtattacaggcatgtgctaccacggccagctaatttttttgtatttttagtagagatggggtttcaccatgtcaaccaggctggtctcaaaatcctggcctcaagtaatctgcctaccttggcctcccaaagtgttaggattacaggtatgagccatcgtacctggcctaagttttgaatgaacagaaattagtatctcagtagttcgttcattggttctttcttttttttttttttttctttttttagacagagtcttgctctgttgcccaagctggagtgcagtggcacgatctttgctcacttcaacctcagcctgcctggttcaagcgattctcctgcctcagccttccaagtagctgggattataggtgcacaccaccacgttcagctattttttgtatttttagtagagacagggtttctccatgttggtcaggctggtttcgaactcctgacctcaggtgatctgcccaccttggcctcccagagtgctgggattacaggcataagccactgtgcccaccaggatctcagttcttcttaaggaaatatttaggtacactgaactgtaagcttcatgaggatgtatagacttacctgtggtgcttatcattaagcctaagctagtaaatgatggggctcataggcagggtctgacttcagagcctaaacttctaaccataagttctttgtttgttgttgttgttgttgttgttgttttttgagatggagtctcactctgtcgcccaggctggagtgcagtggcacgttctcggctcactgcaagctctgcctcctgagtagctgggactacaggcgcccgccaccacgcccggctaattttttgttttttgtagagacggggtttcaccaggatggtctcaatctcctgacctcatgatctgcctgcctcggcctcccaaagtgctgggattacaggcgtgagccaccgcacccggccctaaaccctaggttttgacttctgtaagaaggaaagatttaaacaaacaaacaaacattaaattacaaccataataaacaaaaaaacactaaactaaattacaaccataataaaatctcccaaagtccgtaggcactgacatattacagccttgccaaatcagaatagatttctcatgtgttgtcaatttaccagacacaaagagtagctcagatctcatagactcttcagatcttgtagactaatttcaagtctttttaaagttttgaaaaacatgtgctatttggaattacgtcatcctcgaatattaaacctgagctcaaaaacctattgtttgatattggaaatagttaactccagttttcttctattaagataaaattctttcatcatgtctgtgccctctaaaataatactcctattgctttgtcttccccttctcccctcctagtccttctttagtcattctatttagaatcaagtcgctcatgagtttaagaattagagcagcaagaaattgagctagagatgtacaaaagctttggacaatagtagttttgcttgtcctcattcttattagaagtgctgttaatttactgataaattctaggacggaagacaaatctttgcaactggtactatatcagtcggtaattatttgttttccttagaccatattgagctcccgaagtacagaacaatgagtagatgtgaaccaagatgctgggattttttaagtttcaaatatgtgtgtgtatatataagagacagaatcttgctctgttgtccaggcaggagtgcagtggtatgatcatagctcactgcagccttgaactctcaggctcaagagatcctcctgccttagcctctcaagtagctaggcttacaggcatgtgccacacctggcttttttttttttttcctcttgtagagacaaggtttccctgtgttgcccaggctagtctcaaactcctggccactagtgatcctcctgcgttggcctcctgagatgctgggattacagtgtgagccaccactcccaggctcaatttttttttttcctaaagaatcagagtaggaaaaagtcactttatttagacctttacttttttctttttttgaatcagggtctcactctgtcgcccaggctggagtgcagtggcacgatctcggctcagtgcaacctctgcttcctggactccagtgattctccaaccttagccttgagagtagctgggcctacaggcgtgagccaccacgcctggctaatttttttttttttttgctagtttttatagaaacggaggtttcgccatgttgctcaggctagtcttgaactcttgagctcaaagcaaatcggcatgccttggcctcccaaagtcctgggattataggtgtgagccacatgcctggcctatttagaccttttctaaggagattagaaaattagttgataaaattatttttaagaagtagctacagtagttcatcagttattgttgaaccatgatattgtaggcagaaaggaggaggagcattttgggaggtatatcttacaaaacaacaacagtaaacaaactgatctaataactttctgaagtcacaatatctgccactttcatagagtcaagatagaatcacggtcttcagttcatcttctccccaggaagttttgtaacttttggtggagtcccaaatagattgacatagtccatgccacatagaagcagttcttctgaccagaaacacctgagatgagtactgttcctaaaatactagccctgtagcttgccccacagtctgtagctaactcacatgctactacctctacatagatagccatgtctgatagtctacatagctggagttaggtgtgaactctattgtgagggcacatatggcttatgccattaccgcagtgtcagtaaaaagtattgctgaacctgtggaaatttcaaatataccatcggtatcagcagccacacagtttagcctttgtcactatgagattttaagagtgtccaaagaatcagggtgacctgaactgagtgaggattttagcaagatacagaggcagtgctgtttacaaataaaggaggaggctgggtgtggtggctcacacctgtagtcctggcgctttgggaggccgaggtgggtggatcgcttgagatcagaagttcgacaccagcctgggcaacatggtggaaccctctctctacaaaaaatcagctgggcttggtggtacgcacctgtagtcccagctacttgggggactgaggcaggaggattgcttaagcctgggaggtctaggctgcagtgagttgagatcacaccactgcactccagcataagactctgtcttaaaacaaaacaaaaaaacaggaaaattacctaaggaggatgctacattaagaccataactggcaaattataatgaagataaagactaccagttaattcttcttctaacaataatagccttagtgtttcagaatcacaatagaggaagatgttcttattgtataagctgtttggggttgggcagatatttatgtcatttcagatgagacttgtatttaaaaggttattttttattaaaacagtaactatgtttttttaaaaaaccaaatactgtagtattatatgacagcagggttaccccaaatcccatatgcataaataactgccattattaacactgtagacaactttaattgcatagacacagatagggtgagcaaagggctaaaagggatgagtggagggatggatggttggaaggatagacatgattttaataaaaatggggttacattatatatgctgcttgtatttttaaatattaattttgattctatttgaatttagcagaaagggaaattgaagccattggtaccatgaagtaaatgttaattcacagcaggaagtactgtaattagtttctaaaagctgcttctgagtttgtggggaaaaacattatgaggggaaaaaaactaagtcattgggatctttttaactttccattttagacagtggttgtgctttgaaaggtgaggaaattagtattctaacatttcttttcatcactttttccctgaattgctgagttagtaaattattttagttttattctctccaggtttatgaaatttacattcttttctttaatcctaattcctgtggttgtgttaaatcgattctatatttgaatagatacagtgctaagtaagttgttttgtttttcgatacacacacacacacgtgtgtgtgtgtgtgtgtgtgtgtgtgtgtgtgtgtgtgtgtgtgttttgagacagggtctccctctgtggcccaggctggagtgcagtggtgcaatctcggctcactgtaacctccgtctccctggttcaagcgattctcctgcctcagcctcctgagtagctgggattacaggagcccaccaccacagtccggataatttttatagttttagtagagatggggtttcaccatattggtaatgctgtaaataagttgttttgatgttaattctgtggtgaacaatgattaaaatattgtattcttctaggattaaagggtgtgggggaagggatagcatcatggagtttttagaaaaccagctgttgggttgactgagggacattcatgagttttcgccaagctctcttgcttgtggaaaagaggacaatggggcacttcatgacccagaaagaattttcttgaaaatgatttgctttactgaatggaaattctgttttactaaaatagaaaacattagatatagtccaaaaatatttattgttaagcatatatatcgcgtgctataaaactctattagatattttgtagctttagtagagatcaatatgcttgtaagttgtcttgcacaatatttacagatttctgctgttttataagtttttatcacttccacgtgcgccatcattaaagattcttctgattcttgcgtaactgtattccatccaatctttgatctatattgccagtgtagtttttctaaaacatgccattatcctgtcagtaatccttcaatgactccttataatcttcaggataaaatccagactctaacatggctttccatgcatattttagtgtactgcttactattttacccaatttatctccatgtcccagtaatcagcataataatagctaacatttatgtagtattttttatgccagtaactgaccgagcagtcataataaactcctggtaattctgcaaatcatgaactctcagtactctgcaaataatagaccatgtactctacctctacatgtagagtaccctatgactagagtactttttttttttttgagacagagtttcgctcttgttgcccaggctggagtgcaatggtgcgatcttggctcactgcaacctttgcctcctgggctcaggcgattctcctgcctcagcctcctgagtagctgggattacaggcatgtaccaccacgcccagctaatttttgtatttttagtagagatggggtttcactgtgttggccaggatgctctcaatctcctgaccttgtgatccacctacctcagcctcttaaagtgctgagattacagatgtgagccaccgcacccggcctgtcaatctctttaattatgtaatacttgcttattctttgagattccatccagacatcttttcttggaagcagaattcccatactcattttctgcacctccacccccaccccttaaaatttttgtgagctgtcagggcaatatgttatataatatctagtctaaaatggccaggtgtggtggctcacacctgtaatcccagaactttgggaggccgaggcaggcagaccacaaggttaggagatcgagaccatcctggctaacatggtgaaaccccgtctctactaaaaatacaaaaagttagccgagcgtggtggcaggtgcctgttgtcccagctactcgtgaggctgaggcaggagaatggcatgaacccaggaggcagagcttgcagtgggccactgtactccagcctgggcgacagagcgagactctgtctcaaataaaaaaaaaaataataataatacctagtataaaacagaacatagtttttttctcccttactctcatcctgtgttgcccctttttctgcagtggttaaagttcagtgggattcagctgccctagtttaagagcagaggaaataggatttttgattgttcatcattaccactgccttcttcaaaccacgtgtttgaaaacacatgggccaggtttggtggcccatgcctgtaatcccagctctttgggaggctgaggtgggccagtcgtttgagctcaggagttagagaccaacctgggcaacgtggtgaaaccctgtctctacaaaaaatataagagttagctgggtgtggtggggtgcctgtatagtcccagctacttgggaggctgaggtgggagaattgcttgagcacaggaggttcattgaggctgcagtgagctgtgtttgcaccactgcactccagcctgggcaacaaagagagaccctgtctcagaaaaaaacaacaaaaaacacacatggtccactggtaggaggcacaaaattagtaagatcttgctttcagagatcccagattctactggtaaaagaccgacttataaatagctaattatatctagctgggtcagagacttaaacattaaaaaaaaaaaaaagtaaaagaagtagaagcaacatagacaattttttcccctatcatattgtcttagttcattttctgttgctatgacagaatacctgagactgggtaatatataaagaaaagacattgatttcttaatagctgtgaagtctgggaagtccaaggttgaggagccatatctgatgagggcctttttgcctctaatgatggagggcacctcatgggagagagcaagagtgccagctcaggtctgtcttccccttcttaaaagcccctattcccatcatggggaccccaccctgatgaccttacttaatcctaattactttccaaaggccctacttccaaataccataaacatatgaatttggggattaatttctcaacacatgaaatttggggatacattcaaactatagcacatattgaaatgggaaaggcctttaaattataaaggaaatggtttatataaaaattaaatactttatatgacaaaagccatataattaaaaagcaaatagagaaaaaagatggcagcttttattaatacataactttctgccatatattagaatgaactcttaatattcagaaagtagaaaagattaatgactcattagaaaatacggacaaggcaatgaataggcagttcacaaagaattaaaaagctcataggctttttttttccttttgagacggagtttcgctcttgttgcccaggctagagtgcagtggtgcgatctcagttcactgcaatctccgcctcccgggttcagtgattctcctgcctcaggcctcccgagtagctgggattgcttacaggtgcctgtcaccacacccggctaatttcttgtatttttagtagagacagggtttcattatgttggccaggttggtctggaactcctgacctcaggtgatccacctgcttcggcctcccaaagtgcagggattacaggcgtgagccactgcacctggccaacagatgtatataaaaattgttcagtcattattataatcaaggacttgcaaatttaaacatcaaggtaaaatcttttgcctattgtgtattggctaagttgaggcatccaaaggacccaggggccatcttgtgtgctctcactggcctaagatggaaaataaactatcttaaaaaaatggctacaatggatttaactatatcaaatcaacaaaaatccaggagttcataatgatgctttaaaaataggccaggtgcggtggctcatgcctgtaattcaagcactttgggaggcagaggtggacaaattgcttgagctcaggagttcaagaccagactgggcaacatggtgaaaaccctatctctacaaaacattcaaaaattagctgaatgtggtgatacatgtctgtagtcccagtacttgggaggctgaggtgggaggatcacttgagcctgggaagtcgtggctgcagtgagctgtgatcatgacactgcactccagcctgggtgagtgagtgagatcctgtctcaaaaaaataagtaaaataaaaataacttattgatcatctttggagattgcaagggtgtcaactcatttttctgaatttttttttttttttttttttttttttttttgagacggagtctcgctctgtcacccacgctggagtgcagtggtacagtctcagctcactgcaagctcagcctcccgggttcacgccattctcctgcctcagccttttgagtagctgggactacaggcgcctgccaccatgcccagctaattttttgtatttttagtagagacggggtttcaccgcattagccaggatggtctcgatctcctgacctcgtgatccgcctgcctcggcctcccaaagtgttgggattacaggcgtgagccactgcgcccgacctgaaaatttataataggagaagaatgaagcatttatcctattacctacaaaatgtattacaaggtaatcaaatagttaacagtggaaagcttttcattgaataatttagttaagaagaatgagagagagtactattttgcatccatgtacagtaattgttccaggcagattatcagtatatgctagtacattgaaaagtgtagaaaagtaacaatgcagaccatgtgaggtgtataggccattgtgacaacttccacttttactctgagcaaaatcagcagcattgtaggcgtttgagcaggagagttgacaggatgaaatatggcttagttttagcaaactaactggttgcttacgttgataattggccaggagtgctgggagcagaattgacacatagaccaagctggaagttattgcatcaatccaggtgagagatgaaggttgctcgtaccagatactagtagaggacagaagtgattaggactgtaaatatattagattgatagatctaacagactttgctaatagattaatgtggaaagtaagaagagagaaaaggaggattaaagagaggagattaggaggactctaaagtttttggtttaagcaactgaaagtttagagttgccattaaccaagaaggaggagactgggtggcacaggtttggagacaataaagaattcagttttgactaccttccacgtagtaggtactctctgtgagcataatattgctgaatattaagttccaagggtatgagaaagctgtcatgagatggcctttcattgtcagactcatattgttcattaatcatgatttctcatttcgtcaacttgatgtttttgtattgtgttttgttttgtttttccttctctcttctcccctcccctcccctcttccgacagtgtctggctctgttgcaagctgtagtgcagcgatgcagtcacagctcactgcagcagtgacctcccaggctcaagcgatcttcccattcacttcagcctcccaagtagctgggactacaggctcacaccaccacacccagctaatgttgtatttgttgtagagacagggtcttgccatgttgcccaggctggtctcgaactcctgagctcaagtgattcgcctgccttgacctcccaaagtgctgggattacagtcttgagccaccacgcctggcctttattttgcttttccatttaagatgtgtatataacacccactatatgctgaatactatttaattttttaaatatcaatttatttagtcctaataaaaacagtgaaatatattgtcatacatgattcacagatgaagcacaaagaaattaaggaacttgcccaagaccacacagctagaaaaggtagaactaggacttgaacccaccccttgaacctcagtgcttcaagagttcacattctaaatcactgtgcagtgctgctttcctttttattatttcctgttattttattgtagtcatgaatggagagtgaggattcaagcaaaagccagaagcttattccaagccatctccacacagagtttgtggctaatgagtacttccgtagctttaaaaatcatagttattttcacaatataaaaaacagtaagactgttagtgctggtagaagagtcgtagaaattatatctcatggtgctcttaggcaagattttatgagaccttctgaaatgtaatggttatctaagttggagactatatattaatactgcatctttttgttttgttttgtgttttttttgcgacagactctcacctcactctgtcgcccaggctggagtgcagtgcgcgacgttggcgcactgcaacctctgcttcctgggttcaagcttttctcatgcctcagcctcctgagtgtgctaggattacaggcgtgcgccaccatgcccagctaatctttgtgtatttagtagaggcggggtttcgccatattggccaggctggtgttgaactcctagcctcaagtaatctgcccacctcggcctcccaaagtgctgggattacaggtgtgagccaccgtgcccggccgatactgtatctttatgattctgtttgcatgtctggcatgttacaagaagtattggtttgggatttgtggattaagggtgtttcatatattcccctatttaatgttgcttcagttgcttcactgttgatactgaaaatccttaaggatctggctggtcttttgcattcaggtattggttttgctctatttggtttaaactgatattgccccaaaaggcagtgtagctttttagtacacactcctctttaataatgtcagtgacctttagagctgtcagtttgaaataatgtaactttgcaaagtgttttatatcattggttttccctggagggcatagtgagactacaaacgtgatgataatggtggccttctagcattgagaaaatatattttaaggccatcttgtttaggttatctatattccttgttttttgttttgttttgttttgttttgggaagagtctcactctgtcatccaggctggagtgcagtagtgcagtcttggctcactgcaacctccaccttccgggttcaagcgattctcgtgccttaccctcctgagtagctgggattacaggcacatgccaccatgcctggctaattgttgtatttgtagtagagatggggttttgccctgttggccagactggtcacaaactcctgacctcaggtaatcctcctacctcagtctcccaaattgttgacattacaggcatgagccaccacacctggccagttatctgtcttcttaatggggaccacataaatatagagcaacactatatgatttaattctgcttctctttgttggcattaatgagtcatcagtacaattttagaaaaaatacacaatcatatttttccagatagccaagatgtaacagttgatatttgtttcttatattgaacgtaggtgaaccactgaacgcagtttgagtgactgtcaagtctttcaagaatcaaatataactaatattgaagatgcataagaaaaataaattcattacatacaatggatgtcttagtgcatttgaacttaattctctcagacagcctggttaggctcatcttgactggtctgtttttgtaagtctcaagatctaagggtggtttttcgtgaagtggggacagagattgtatatggtctgcaacacctgaaatatttattatctggccttttacagaaaaggtttgtctgactctcctggagaggagagtacgtagatttgaatcccagcctctctcctttggtaactgtttggcctcattatctgactctaaatgggagatagtaatagtacctatctcagaattgttgtgaagattacacaaagtaatgaatgtcaagttttagaatacagtttaatgatggttaactggtattttaacatacttaatatgtaatataaaatggtaatatatgctgttgctatgtgaatgtggcagatatcaagtcctggctttgtgatataaagagatttttttgttgttgttttttgtttttttttttgagatggagttttgctcttgtagcccaggctggagtgcagtggcgcagtctcagctcactgcaacctctgcctcctgggttcaagcaattctcctccctcaacctcccaagtaactgggattacaggtgcccgccaccacgcccggctattttttgtatttttagtggagacgggttttcaccatgttggccaggctggtcttaaactcctgtcctcaggtgatccacccatctcagcctcccaaagtgttggtattacaggcgtgagccaccatgcccagccaaagcaatgttattttaattgagaatattagccaatatttgtggtaccatgatattttatagattgttgtggtggaaatatcctcttaaaagccatgtgatctgtcttccattgttttaccacttttcagtgtttgataattcactatttctcttagtctgtctctttggataacattgatttatttgtttttagttgatgtactggctctgtcttcttctagcttcctctaattgctattcatttgagttttgttgtcctagataagcagctctcagacttgttggtctcaggacctcttaaaaattattgagctctttgaagagttattgtattaattattcgaactaataacctcttaacatgttaaacaacatattaatgaaaaattgttgtttcccaaaacaaaaaaaaagtgggaaaaggggcattgcttttaccttttttgcacatttctttaatgtatgggttaacagaaggtaactgaattcttacatctgctttttcattcaactgtagcatatgttattttggttgaagtatgtcacgaaaatccagcctgatacagaaaggttgttggaaaatattaaaatagcctttcagataattgtagatatttttctttgatacaacactaaaccttgatgagtagtggtgggattttttagttaataaactttatttctagagtaattttagtttcacagcaaaattgagcagaaagtagtgttcctatataccccttgctcccacacatgtacagctctcctcctctgttgatttctccatactacagtggtacatttattatagttgatgaacctacgatgacacgtcattatcatccaaagtccataatttatattaggtttcactattggtgttgtatattctatgggttttgacacgtgttgaccattgtagtgatgtacagaatagtttaactgcttaaaaatcctctgtgctctgcctgtttatccctcctcttgcctaactctggcaaccactggtctttctactgtctccatagttttgtcttttccagaattttccatagttggaatcctatagtatgtagccttttcagcttggcttctttcacttagtaatacacttctttaatgcgtattactccatgtctctttatggcttgatagttcatttctttttagcagtgtctagatgtatcgtttatccattcacttactaccaggcatcttagttgcttcaagttttgacagttataaataaagccactataaaatttgtgttcaggtttttcttttgttgttgttgttgagacagaatctcatgttgttgttcaggctggagtgcagtggcacgatcttggctcgctgcaaccctcacctcctgggttcaagcaattctgcctcagcctcctgagtagctgggattacaggcgcgtgccaccacccccagctaatttttgtatttttagtagagatggggtttcaccatgttggtcacactggtcttgaactccaacctcaggtgatctgcctgcctcggcctcccaaagtgctgggattacaggcatgagccactgccccagcctgtgtgcaggtttttatgtggacatgttttcattttatttgagtaattaccaagaagtgcaattgctgtatcatatgataagagtatgtttaattttgtaagaaactaacagtcttccaaagtggttgtacaatttcgcatttctgagagttctgttgccccatgttttcaccagcatttggtgttgtccgtgttctggattttggccatctgatagttgcatggttgtatctcattgttgtttcaacttgcagttccctgctgacatataatgttgaactttcatatgcttacttgccttctgtatgtctttgatgaggtgtttgtagaggtcttttgcccattttcagtcagattgtcttcctattgttgaattttaagaatcttgtgtatattttgaataacaggcctttatcagatgtcttttgcagatatttatttcccagtctgtggtttaccttctcattctcttgaatggtagtttctttttaattaatgaattattttaattgacaaaaattgtacatatttgtggtgtccaacatgttttgatacatgtgtacattgtgtaatggctaaatcaagagtggaagtttcttaaataatggattttttaaaacagtgatatagatagctcacagatacaataatatatggttattacatataccatataacatatttcaaatgtttatactgttaaatatataataattcacctcatttataataattttgcataaattattcaagttcagggacttctgaagattcaggaggtcaaaactattttcataataattatactaagctgttatctgcctttcactcttcattctctcactagtgaagttttccagaggttatggtatgtaattataccatcactctaacagctaatggaatgtgagtccattttctgttttaatttcaaatatagcaaatagcaatagatataatttacataaacaaaaggtctttagcggtttcagtaatttttaagagtataaagtgatcctgggagcaacatatttgaaaacgctaaagtagtatctttggattcttttgcagggcataagcaaggggttcactttgtccagcaagactgtcatcctttctctgtacctcggaagagaagaacttcctttgccagtgtttggatatcccccctccccagtcaatcctttctgcacctgggggtgcagtgtctctaggacagcacttctcaaacttcagtaaacataagaatcacctggaaagcttgttaaaactaagattcttgaataccatttccagatattctgattgattaggtctgggttgaggtataagaatttacatttctgtggaacaagctgcccgatgctgatattgcaggtcagtggaccacacttttgagtaaggtctagggtcttagcctttatgcgagagtctcagtttcatttcttaaggcccttctgcccctgcatatgtattaaaacccaagttggttttaatacatgggtaacacagcatgttacccatattaatcagtgcactctcagctctgtcctccagattcttcatttctggtacgtgaggcatttcctacctaccttttcagcttagcttgatgtgtgtgtttgttggggaggggagtgggtatacgtgtgcacttatcacatattttatccattatatatagtaataagacttttaagttgtcttcacatacttctctgaatagtttggtcccaccaataaacctatcactgttcaactggaagtttcctgtaaatctatttatagaccttttgggaaaatgccattaaataaataccacattattttggctttagtatatacttaatttacggaaatgcagtgctttacagttatttagaacatcacttctcatttgaaaatagtaaagttttcagatttgtacccaatgtgttttgagcttagaatgtaacaatgcatgtttttaaaaattgcattcttaatcgtttgttgacttgtcatttgtttctcttttagcattaggatgttaattaggttttgtttttgtttttgttttcgtttttttgagacaggctttcactctgtttcccaggctggagtgcagtggcatgatcacggctcactgttcccttgacctcccaggccctagcgaccctcctgcctcagcctcccaagtagctgggatcacaggccagtgccactgctcctggctaattgaattttttttttttttttttttttttagtagagtcaaggtcttgctgtgttgcccaagctgatctcaaactcctgggctcaagtgattcctgcctctgcctcccaaagtgctgagattacaggtgtgagccacctcacctggctaaatgtttttttaaaaaggatttcagttaagaatttgggttgttcaggatgaaccgaaaagaaaaaaaaaagataatttgggttggtcaggttttacttaaagttctaattatgggatactttagatttgattttatatttttgttaaaaagggtgccccgttttaatatttcttgatatgtttcccttaatgattttaaagattgtgtttgttttttgagacagagtctggagtgcagtggtgcaatctcagctcactgcaacctccgcctcccaggttcaagcgattcttgtgcctcagcctcccgagtagctgggactacgggcatgcgccaccatgtcctgctaatttttttatttctagtagagacgaggtttcaccatgttggccaggctggtctcgagctcctcgcttcaagtgatctgccccacttggcctctcaaagtgctgggattacaggtatgagccaccgtacctggctaaagactttgtcatacatcattctagtcctttatatttgctttgttgaagtgcactcagaactttagtaatcagttcatcaccacataagagatatacaggttgagtgtctcttatcccaaatgcttggaaccagaattattttggattttggaatatttgagttatgcttaccagtttagcatttctaatctgaaatcctccaatgagcatttcctttgaggatcatgaccgtgctaaaaaagtttcagattttggagtattttggatttcagattttccgattagggattcttaactcatactatttagtttataatattattcccaaaaacgttcaacaacttatagtattctcttttagctgtactgacattctttgtaataattgtagattcagagaagaatatacaccaccacttaggacttgctgattgcttagggtccttgtataaatctaatttgggttgttttttccttaaatggcatgaccttatacttactcaaccttaagagattttactggattgtttgtctaatctttaatgccatctgtaaactctacatcttttcctgagcacttggaataattagactagatactgaggtatcctactgcttacacatctccagtcaaaagtacccatttattcctatctttaaaccagtattctaatcatataactttatactcttttactcagcaaattgggacctaaagatatgctacactattctgaaaatgtaactattagttgtaactttaataaatagagcaagaaacctgtgacaaaaatggattgatttgatccttcagagtctctgaggtgtggtccctgggcccctggtggttcctgagacttagggatcagaaaggtcagaattcttttcatgatgatattaaggtgtcatttcccctttgcactgtgttgacagttgttctgatatggaaggagtgatgatgggtaaaattgctctggtccacaaattaagacagtggcaccaaacttttatagtagatattatagtctttcactgccttgcactcagagcatgtgccagttttacctaagaatgcccacaatgaaacagtgaaaatatactactttggccgggcatggtggctcacgcttgtaatcccagcactttgggaggccgaggtgggtggatcacgaggtcaggagatcgagaccatcctaacatggtgaaaccccgtctctactaaaaatacaaaaaattagccgggcgtcgtggcgggcgcctgtagtcccagctacttgggaggctgaggcaggagaatggcgtgaacctgggaggcagagcctgcagtgagccaagatcacgccactgcactccagcctgggcaacagagtgagactccgtctcaaaaaaaaaaaaaatactacttaatcatgagccttgggtctccttaatattctatgcaatgcaatggaaaatatgcataaaagcacttatgtgattgagttgcaagctaaactagctactttttttttttttttaattgagacggagttttactctcacccaggctatagtgcaatggcgccatctcagctcactgcaacctctgcctcctgggttcaagtaattcttctgcctcagcctcccgagtagctgtgattacaggcattcaccaccacacccagctaatttttgtatttttagtacagacagcgtttcaccatgttggccaggctggtcttgaactcatgaatccaggtgatccacctgcctcaacctcccaaagtgctgggattacaggcatgaaccaccacacctggcctacttttttcgtagaataccattttacttggaagaatatctgacaaactgtggttattcagatttcagtatttagcaaacattgtcttaaaaatgaatgaagtgggctaggtgtggtggctcacgcctgtaatcccagcactttgggaggccgaggttggcggatcatgaggttaggagttcgagaccagcctggccaacatgatgaaaccctgtctctactaaaaatacaaaaattcgccaggcctggtggtggccgcctgtaatcccagctactcaggaggctgaggcaggagaatcgcttgaacccggtgggcggaggttgcagtgagccagatcatgccactgcactctagcctgggtgacagagcaagactccgtctcaaaaaaaaaaaaaaaaaaaaaaaaaaaagaacagtatatattgtcaatttcagcttccaagaaaaattagaatattggaaaacttaaatccactactgcgggcatgagaacttcccttaaaagacctttctgataggatcagtagtgatattaacaaatgtaatttttttttggtgttacattgtgtgatggaaaatgcacatacctcagtgaattaatgctttccaaatgaccagtaatgatgttacaaataaacattggtcaagtgcaaaatagactgatggattttttttgtaggagaaattttattttttaaattaagttgtagtaaaactgaccatttttgtgtacagttgtatgaattttacctcatgtataaatttatatacccaacaccacaactaagaaacagaatagtttcatgacctcaagaagttccctgtgctgtcttttctaattgccccacccaaaacctctggcagcctctgatccattcatttgctatagttatgttttttagagaatgtcatataaatggaatcatacactgtgtaaccatttgagactggcttcattcactcaacatgtatttgagagtaatccaagttgtatcttccgttatttcactccattttaaaaaactaaaattcaccatttgagccattttaaggtgtgtataattcaggagcttttagtatattcaaagtgttgtacaaccattaccactatctaattgtatagcattttgatcacctcccaaaagatagaccatacctattacatagtcacttccatttccatatttcctccataatatcctttatgtctgtgaattttcctgttctggacatttcatataaatggaatcatacaatatatggccttttgtgtctggctttcatttagcatatttttgaagttcatccatgttgtacgtatcagtattcattcatgttgtcagctcaggttgccataaccaaaataccacaggcttagtggcttgaaccacagatacttatttcttatagttctgaaggctggaagtacagatcaaggtccggcagtgttggtttctgctgaggcctctcctcctggcttgtaggtagctaccttctcactttaaccccacacagccgtttctctgtgctcatgcagggaggtagcacaagtgatctcgagcgtgtgtgcaccttctctggtttctgtcctaacaaggacactaattctgtcagatcagggacccacccttctgacctcatttcatctttgttgcttccttagagacctcatctccaaatacagccacactggggttagggcgttaacatgaattttgggagtgacataaactttgagtccttaacagttcttttttatggttgaataatattccattggatggctgtactccattttgtttatccactctttagttggtggacatttgagtgtttccgctgtcaggttattatgaataatgctgctgttcaatactgctgtgaacattcatgtatgactttttgtttgaacacctgttttcatttctcttgagtatatacttaggagtggaatgctgggtcatttggtaattctatttttaactttttgagaaacacctaacttgttttccagagcatctgcgccgttttgcattcccaccagcaatgtgtgagggctcccatttcttcacttcctttaccagcactcgttattttctttgtatgcgtgtagtttttttgttttgttttgttttgtttgagatggagtctcgctgtgtcgcccaagctggagtgcagtggcatgatcctagttcagtgtaactttgaactcctggagtgaagtgatcctctcacctcagtctaggactacgtaccacatctggctaacctttaagatattttgtagagaaggggtctggctgtgttgtgcaggctgatttcaaactcctggcctcaagcaatcttctcacctctacttccccaaagcactaggactgtaagtgtgagtcacccctgcccagcctaaaactgattttcttatgctaatcttgtattctacaaccttgctgaacctgtttattaggttaatggtggtgttttgaaagattctttagaattatgtatatataaaatcatgtcatctataaaagtagttttacttggtctttccaatttggatgccttttatttctttttcttttttctaaccacccttgctagaacttctagacaatgttgagtagaaatggtaagagcagacatccttgccttatttttgatattaggggaaagctttcagtattttgctattgagtatgttagctgtttcataaccagggttatgaaaaagctcctttctattcctagattgttgagcgtttttatcatgaaaaggtgttggactttgtccagtgcttttcctatgtcaactgagatgatcaggtttctcttttccccgctttattctgttaatatggtgactttttttcaactgattgatttttgtatgttgaaccagccttgcatctctgggataattccatgatggatggtcatatgctgctaaattttgtttgctagtattttcttgaggattcttgcatctctattcgtgagggagattggtctgtagtttccttatgatgatgtctgtctttgctatcagggtaatactagatttatgggatgagtttggaagtattcatcccttttctctttttttggaagagttgaaggaaggattggtgttcttctttaaatgtttggtaggattcaccaatgaagccatatggtcctggggttttttttgttggaagttttattacagttttcatacttgttataggtcttttcagttttttagttgagtcagttttggtagtttctagaggtttatccattcatctagattatctaatttgttggcatacaatagttcatggtattctcttgtaatccttcctgtttctataagattgtaaagatgtccccagttttattcctgattttagtaaattgaatcttctctcttcttttttcttggtctgtctagttaaaggtttgtcaatattgattttttccgagaaattttgggttcattgatactgatttttctgactcttttttttttttttttttttgagacagggtcttactctgtcttgactcttttttttttttttttttttttttttttttttttgagacagggtctctgtcgcccacactggagtgcagtggtgtcatttctgttcactgcaacttctgcctcccaggttcaagcagttctcctgtctcagcctcctgagtagctgggattacaggtgcacgccaccacgtccaactaatttttgtatttttagttagagacaggtttttaccatgttggccaggctagttgcgaacgcctgacctcaggtgatcacctgcctcggcctcccatagtgctgggattacaggtgtgagccaccacacctagcctgtagttacttttttgagtaactatttaagaatgtattgtttaatttccacatatttgcaaatttttcagttttcctgttagtgatttctaacttcattgcattgtggttggaaaagatactttgtgtgatttcagtcttttgaaatttacggcaagtttttttgtggtctaacgtgttgccctagaggatgttccagtgcacttgaaaagaatgtgtattctgctcgtgttggttggagtgttctgcatatgtcttttaggtctagttgcctaacggtgttgtttaagtcttctttttccttatgtatcttttgcttagttgtaccacccattattgaaagtagggtgttgaagtctctagctattattgttgagccatttcttccttcaagtctgtcaatttttgcttcatagaatttggggctgtgttgttaggggcatatatgtttttaattcttaaatgttcttgattgactcttatcattatataatgtcctttgtctttttaagtagttttgtcttaatgcctttcttagtccacttgggctgcctaagtggcttataaaaaaaattatttctcacagttctggaggctgggaagttcaagatcaagacacagacagatttggtatggtgaggtgccgctttctggttcatggatgactgtctttttgctatgttctcacatgacaaaaggatgagggatctctcttggtgcctcttttataagggcactaatcccatttatgaggacactgcccttattttcttaatcaccttccaaaggccccacttcttaatcctatcaccttggaggtgataggatttcaacatatgaatttttggggggactccaacagttagaccatcgcagtgcctattttgtctgatactagtatagccactccatttcttttttggttgctgttcgcatgggctttttcttttctttcaccttcaacctctttgtgtctttggatctaaagcaaatgtcttgtgtacagaatattgttggataatgctttttaaattaattctgcccatctctgcctattaattggaggctttactccatttacatgtaatataattgctgataaggaggaacatttcccattttatatttctttctgtctgtcttatatcagttttgttcaagccctccatgactgatttttgtgttacatattttctagtgtaccattttgattcccttctcatttattttactacataatagttattttcttggtgtttgtcctggggattataattaacaccttcatttgtagcagtctattttgaattaataacaacttggtttcaatagtatataaaatactttgctgctacatagctctcccccctccaataaatctttatgcattgtttgtccatcaacacagagttataattattgttgtatgtagtcttttaagtcatatagggaacaaaagaggcattaacaaactgaaaacataacctctctgccttctttgcttcctaacactttataatataatatctctaatatgctttcagatactattctaaataatttacaaatacttgtctaatcacgttataaatttatagccaaggaaagtgaggtgtgaagaagacaaattgtccaaggtatggccaggcacagtggctcacacctgtaatcccagcactttgggaggccgatgcaggcagatcacaaggtcaggagttctagaccagcctggccaatatggcgaaacccggtctctactaaaaatacaaaaactaactgggcatggtggtgggcatctgtagtcccagctactcgggaggctgaggcaggagaattgcttgaaccctggaggtggaggttgcagtaagccaagatcgcgccactacactccagcctgggtgacagagcaagactctgtttcaaaaaaaaaaaaaaaagaaattgtccaaggttatagagcttttaaaagagaatcagatatttgaacccaggtgacctggcttcgtaattcatattcttaaccactacatctcttacttcctagagttgtagtactccttctattacactacaacagtgaatgtaaaattcagttggatacataaaatgtgcattcatgttgaaaatgaaggaaaaataaagtgaaagatactgggaatcatttgggaggaaagataacagctggaagggacttttgaactatggccttgaagaccacgtaggatcaagactattgatatttgagagaattttatttatttattttttgtaatggagtctcgctctgtcacccaggctggagtgcggtggcatgatctcagctcactgcaacctccgcctcctgggtccacaccattctcctgtgtcagcctcccgagcagctgggactacaggcacatgccaccacgcccagctaaaatttgcatttttagtagaggtgggatttcaccatgtctcaatttcttgaccacgtgatccgaccaccttggcctcccaaagtgctgggattataggcatgagccaccgcatccggcctgagagtacattttagaaggagcaaggtgaagagagggatcaagacaaagaaaatcaaggcctacttgagaagcagattgttattgaaaggcattgaaaaggagtgttgaaaaggttcacttttggaagaatttgaaagccagactaagcagtttgaattttattatgcaggcagtagctaatcattgaacctttttgagcaggggagaactattaagaattttgtatataaatctgaaagctgattcaaacattggtacagtttaaaattttctaatatatccttcaattggggccagactgagggtttatcttttgtactgccatatattatgatgtgttagaagtgtggtaaaaagtaatgatttttaaaatatataaattagatatatttagatgtgtttgattacattaaaaggaacctgtttcctttcagaatcctcggatgacatttggagtgggttaagatatgtctttatttcaataacagtgccatatataatagttcagatcagctagtattttttgagtacttaccatcaagttgtttgctagatggtaaagatagaacagtaaaaaagacctgaccttaattttcagtctctttttctttctaatctttaaacattggaatgctccagtatttggtcctgttgcttcctttccttaacttaatatgatcttatctagttctaaagctttaaattctgtctgtactttactgattcccaattttatattgccccatctcagtgtctcccttttaacttcaaagtcacctatccaattgccttcttcatagatctactttgatttctaagtagcatctcagacttatccccaaagtgaactagatctctgtctgccaaacatttaccctccagtcttctccatcctagaaagttacactaccatttactcagttcacagaccaaaagtgtaagtgtcattttccctcacattccacatcggcacatcatcaagcaagttggttttatgtttgatgtataccctctatggggtcactaccctctaccgccattgctacccctatctcttgccaaggctgttgtcataatagtctcctaatgctttatctaataatctgttctctacagctacctggtaatcttaaacaatatatatctaattgttttatctctaccactacccagatataaaacttaagtggatttctgttaaaattcaaaatccagtctcctcaccgtggactgtatgatcatacctctaaatctcttaccttatcttgtacttcccatcttaaatcaccttgctgaccatgcctgctttcttgctaattctcaatataccgtacttcataccttaactacctcagtgctgttcactctgcctagaacattcatgtgtctccatatggcttgttccctcacttcattgagtgctcagaaatgttacctcctttgcctgtaatcccagtgttttgggaggccaaggcagaaggatcgcttgagaccaggagtttgagaccagcctgggcaacatagcaagactctgtctgaagaaaaatttaaaaattaactagctgttgtgatgcatgcctgtagtccaagctgctcaggaggctgaggcaggaggattgcttgaccccaggagtttgaggttacagtgtgctgtgattgtgccattacaacccagcctgggcaacagaaagagactctgtctctaaaaactaaaaagaaaaaaaaatcttgcctcctagataatttttttctcggctctctaaatgctgtcttcgctgctttgtacagtagcacttatatggatgttactgacatttctggtatttagaggcgtgtgggttgaggagggatctcactattaccgtatagtcataccttatgtcattgactttttttattcacaaatgtattagactgacatacatacctcaaatagagttgactgcttgtgaggaatgggggaaaatatgagaaattttaatttattttcttttcagtaaattacttgcaaagtaattttattagttttatttattattattattattaccatttgtttttttgagacagattcttgctgtgttgcccagactaaagtgcagtggcatcatcttggctcagtgcagcctccaccacccaggctcaagcgattctcccgcctcagcctcccaagtagctgggactacaggcacacaccacgaagcctagctaatttttgtatttttaatagagatggggttttaccatgttggccaggctggtcttgaactcctgacctcaggtgatccacccgccctgcccttccaaagtgctgggattacagacatgagccatgatactcggcccaaagtaattttaaaacaatctagagttattgagatccacacactgaagatagtaaatgaatctcctaatagtataaagctcccgcaagcatgctaggtctaggttggggctaactctggaaagaagagagtaaatggacaaaggaatagggagaggatgggaagggatagaaaaggaagccccacctttccaaccctaagaactttcaaagtttagtttttatctctgttctttcaactatagaaatttccattttacctaaagtgaaggaaatcattcagcttataattttgtttttacttagttaactccattattcccaaggaatgagagagagagagagagagagaaagagaaagagaaagagaaagaaaagcaaaaaaaaaaaaaaaacccaaaagaatgcttacctctcacagtgtaatttgtagttttggtatctttgagaaaaaatgtgatgtaaaaaagatattatggattcagtaatgctttttaaatgaatacatatgttattgtttgtagcagggtgtgttaaaaaagagtagttagtggctgtatctgcaagcacatttttatttgatttacaaacagtgctcatatgaatttactgaccttgtaatgacagaggtcttcaaacggattgtggcctatggattgtgaactgatgtaattgactcattcctgatcaacctcagatttgcatttaaatggtttctttctaagcatgattaacctagacagtttgatatactagaaaaaatgaaacagaactgcccctggatttccaaagacttaatctgacctagctactcactacctctgtgattttggtaacttatttaatacctttgaatcttgtttatggcattatgtatgtaaatactgtattctgataatgttctaactactcagtatatctttcttttccctccttaatgtattaatactattgtttttcaggactttatcttttttgttttatttctatcttcactatgattacagctttccgcaaaaaaagtttgctgctgtttgtgggccagcaaaagctgtttgtgggccagcaaaaagagcccttaattatgttctggttttagtctatagatacagagaacttagttgagctggagcagaaagccatcttttttttttttttttttttgtttggtcagatatctgttacccttctgttttatttctattttttcaagtctttagcttgcctgacacataaaacagagtccttgtaaaatctccaacctctcagttaattataatgatgtaggaattaaaaagagtgtgtttgcattcatccaacaaatatttattgagcacttacttgaggatggtagttcaaagtatagggtgatgttaaaagatgaataaactccagttctttgctgaaaatctagcggattaaataccaaaaaaaggtatataaatagtacaacttgagtactgatgaggatgttcctaactttgcctggggcttatggggtgagatggggataccttagaattagattgagggttgcaggaagaacattgtaggctgacgacatattgtgctcaagtggcgtggaagcattgacagtatgtgttgtgactgatcagtatggccagagcatagtgtatgtatacagaatatggtagcaggagagactgaaaagataatttgggatcagatcctataatgatcatgcatggcatccagaaattgaaatcttcactattgtcagtggaaagctatcaaatgtttttaaaacctagaaaggatgatgtttagcagcagcatgaagggtggattctggtggtagagatggtggtgtgggagaatactaagataaattaaaaattaagagatgttattaataggtggtgtgatgaaatgaaaagagcctgggctttagaatcacaggaatggttttaaatctagatattggcctttgcagtttggaacgaattagctgctttgattttcagggttgtttgttttgttttgttttacacattctgggtagtaatagtgcttgttttacagtattcctttgaatattttgttatgggcatgaagcacctgctatagtgcttgcctgataccaaataagggtgcagttaatgataactgtcattattatcaacatgagtgacatttattataattgttaagataagagatagtgaaaacctgaatttagggatggaaaagagagaacagattgggaggaatctttctgaagtaaaatgaataggactcaatgaccggaatacttggtgatttatggaaagaatagaattgtgactaaccgaggtctctatttaacctgaataacttggggggaaggtgttcgtgatgccattttcttagtaatgaatacagaatatagacgaaatctatgattgagatgaaggaaaggagtaaaatgattttgatttggtgggcatttttaggtatttaggagattttggtgataatatgaagtaggaaattagaaatttggtcttagggcaagagataaaggattggagagttataagtatctgcatagtagtgggaaagcatgttaattttgattccttgactagaattataaatatcttaacggcagggcatatttttaaacataacccctgtatccccacactgctgagctctatgtaaacacttgattaattcttattaaatgtgagatttaaaaaataatattcttgatggctttgtgaatagaaaaggtaatgcatagttattttgatttttaatttttaaatgttcactttatttaaatttataaacttaaaacctggttctctctaaatacagatcttattctgtaactaattttaacaaacttttgataaatatcttaatttaacttcttaaaacatttaaatctgtaagtataaattaaatttattttctctgtaaatattgattaataaaaccttagatacttaaataaatcttgtaaatctaataatttaaaattgtaaatataaacatccttaagttttgtgagtattcttatacaggatgcaaacttagtaaaatttcggcttaaaatcataagtctaaatcagctgttcaattatacattttaaattagaattacaaggctggctctaataggccagattttcttaaaacattacaaatttttaccaaacaggcatagagtacctgttttgtaaacagctttattgagacataatttacataccttacaattcacctattttaagtgtgcagttcaccgatttttattatagtcacagaattatgcaaccatcaccaccatctaattttagaatatttcccttaatacaaaaagaaatgtgttgcccatttgcaattattttttcattttcattcagccataggaaaccactaatgtactttcttctatctatagatttgccttttcagtacattttatatcaatggactcatagtatgtggtcttttgtttctgtccttttttcacctaacacaatgtgttttgaggcttattcatccatattataattttattccattgtatggatataccacattttgtttatcacagattacctcttaatatacaataattaaaattttagttcttttaagtcatcctatacttgattctttttttaaaaaaagaaacctgaaaataagtaaatgaatctcttacgagttagacaaaaatgcaatagaataaacccaaagaaatggataattgaaaaaaattaaagcaaaatttaatgaaatcaatgatataatagagaagaacaaaaaagtcaaagtaggtttttaaaagaaaaaaactaaaaaagaaactgataggatcaatcaaggaataaaagaaacaaaaatagtatgaaaatgaagactgacaacatattagagatcaaaagacaaggtatttatagcagcctgccattagtttttatataaacagtcttttcccttttcaggagatcattattcccaatcatatttttcttaatggaactactttgagtaacccttaccccccagagtgaatggctgttctacttcccaaatcagagaatatctataaatgtcttttatcaatattcataagcaacacattgtcttcatttttcctctagaattttgtaaacactgcttcgtaggcttttttttttttttcttttttctgttttaagagatggggtcggccgggcgcagtggctcacacctgtaatcccagcactttgggaggccaaggcgggcggatcacgagttcaggagatcgagaccatcgtggctaacacagtgaaaccccgcctccactaaaaatacaaaaaattagtcaggcgtggtggcgggcgcctatagtcgcagctactcgggaggctgaggcagcagaatggcatgaacccgggaggcggagcttgcagtgagccaagatcacgccactgcactccagcctgggcgacagagactccgtctcaaaaaaaaaataataaaataaaaagagatggggtctcctcatgttgcccaggtcaaacccctggactcaagcagtccttccacttaagcttcccaagtaactgggactgcaggtgtgtgtcaccacataccattcccagctctccatacatgtttagcatttacatttaccagtgaaatgactggtagtctaaatctctttcctcttattttaagtaaaattaagtgaaatattttccatatttggagcttgtaaatttttattgttgaaattcagatattttaccaggagagtctacatgtgtagcttcccctccaaccccctagtgctgccccagtatttcatggagcccattagataagaagactcaagtcagtaatcaacattaggaagtttttgtttccttctaaatttttaaaacgttcattctttgccttttcttgctctaaaaatcctattttacagatactgcacgtctggccacctcatctctaatctttttctcattatgtatgtgtctttgacacttcactatacaatattaggccatttcttccttccttccttccatccgttcctccatctgtccatcggtccaccttctttcaatggtctcgctctgttgccctggctggagtgcggtggcgcaatctcggctcactgcaccttacacctcctgggttcaagtgatcttaccacgtcagcctcccgggtagttgggactacaggtgtgtgccaccaccctgggctaattttttgtacttttttatagagacggagttttaccatgttgtccatactgatagtaggacatttcttaagttaattttctaaatcactactttgttgtgtatttctctacttaattctatttggtaattttagtagtttttctcctccccccaagcatttgttctctgctattttattcagagctctttgctcttaaaaaaaaaaaatactatttctccctggcctcaataaaaatactatttataatttgtcttcaagtgctgctgttttgtcttcattaattctgtttcattttgggccattagtcgtgattaaagtgttacttctctttggtatatctggctaggttttgtcatcagttcttgtgctgggtaattctgagagtggtaagtgagccaacaaatagggttcatcatagtgcatcatctgggagaatgtgctcaggaggagaggaagaattattaatgaatgtagttctctaataatgaaaggaatcaccagggatagtaaggggaagagaagcctgaatggtcattgctcattatctatagaagttcatttgatctttgatttaataacatgctgagatagttggaatgtcaattaaaaagaattgattaccttaattacctgggatagaatataaaagattgtataatctagtgttctaaaattattaccacaattactattgcaccaacccaatactttcactttgtgactgacttcgtatgaaggctcagtgtggtggtggcatcaagtcacacatcctgacttttaagcaaacaactccagataatatcattcccctctttgtttattaggacactaattgattattattgccagcaagcacctttgaactgatactttgtaaaatataatacagtcatgtgttgcttaacaatggggttgcattatgagaagtgcatccttaggcagtttcatcatttttcaaacatcgtaaagtatacttacacaaacctagataatatagcctactacatacctaggctatttggtatagcctgttgctgctagcctgcaaatctgtacagcacattactgtactgaatactgtaggaaataccaccattgtcacacaatatcattgtcacacagtggtaagtatttgtgtatctaaacatagaaaaggtacagtaaaaattgtcacacgtggatagggcacttaccataaatggagagtgcaggactggaagttgctctgagtgagtcagtgagtaagtggtaagggaacaagaaggcctagaatgttgctgtacgctactgtagacttataaatactgtacacttaggctacactaaatttacttaggaataaagtaattgcagtccaacattacaatggctgtaatcaccaagcagtaggaatttttcagctccgttataattttatgggactaccgtggtatatgcagtccatccttgactaaaacatcgttgtgtggcatgtgattgtactttattgaagactgagcaccaagctcagtacaagcttgcatacaagatccaggggccttgatgtaaaaattgctcattttctgatatattcctgcatttccttcagcacctctctgaaactactagtctctgtactggttatctcagaggagaggttcccaagacccaggaaccgttttttcattctgttaatttttttccaaaagaacaggctatattgctgaccttagttagctttgtatttgatatattcctattctgttactttttataacctgttttcccccttttcgttggaaatggattgtgatttagattgaagggggaaatttgtgggagattttagtcttctatcttctgttttcgagagctgtgtgattaaatcggaagctaatcaggcatgtgaagcctttctgtgagagaaacattgttcctataagagaaacattgctttctagccttcctggagcattaattctccttgaggagataagacataaatgaataaaagaaaaatgagaacatagtgtttagatagcctgtgacaaattttattttacaaaatacttgaaaagacagtgttttgtaaatggcagaaagcagagaagacattaggcaactgacttttatttaaaatcaagcaacagtcttgagaattctgaggatgagagaactggaaactgaagattcatgagggcaggtaacatggcagctcaacactgcctgttgaacagtccctggcagatgatagactctcagttagtgtatgtcgaataaattaatatgtatttgttgaacaatgtgaagagttatcttgaaggagagagatactatattttagcaaaggtgagatgcagaggcttcagaaaatgttaggaggtaggaatgatcactgaacacaacagaagaccatcctgaccagagctgtaggaatgagcaggaaaggtctggtaagtaagccagctaacagtaggtagggtcaaattataagcagttttgattgccgaatttggaatttggggtttgttctttaaccagtgtgaactttgaagaggtggtggcatcattgaagcagtgttttaggaatagcctgaagacatggtgcaggttgcagtgaagaagaaactagagctcaaccttgagactagttgtgatgttggataggaattctttcaaaagtagtcaacttcgataaaataaataatttttctttatatgtgatatgtaaaggtagtttttaagccttagtgattgaacataacggcatggctgtctttttcagtatttagttttccatggcattttgttattgatctttctggcttttctgtgatatcatggtatacattttgaatatatttgttcttcgcttatttgcctttcattaatgtcaagcatagcacgtcagacattccctgttgctatgcaactgctaaattcaatatttagtattaataaaactgagtggcattaacatccagtgaacagagggtagcaaaatacgactttacagtatctaatcaataatatttgttaggtttaatgtattgttgcagatatgagcaaaagaggagtgacttgtttacagttgctattttgagcaaaattagttgtgattaaatctttgtgtttataaccagattttttttgtttgcttttgttctttgtcattgctttttcatctgtgactcaaatttttgttagtattattgatcttctgcccaattttcttatgtcagattctgttcttctttaaaatttttatctcccaaagctttcatttgcatttttctttcctggcattatttcttgctatatttacttttttccttttcaagaatttacgctcagcccgaaaatttggaatttgttacaattttatataaacccaggtgaaagaatattagatttgctcttcaggataagacctacttaataatttcctttagctatttgcgttgtgtatttgatgcttgcaaggtgttgaaatactttattatttgtgaaatcagattttcttttgggagggcaggtaggggggctttaagaattggagataggctgtgggatttatttatttttttaagtcagatcgttctgaaaatatctgatctccagggccaaaataggcagtatctagcattttcttctcttctcttatcactacctccccacccccacagccctaccccaaccctttttcctccctagtgtggaagagaggggaccatagcaatttagtggaatatattttaattttagtaggtaaataatagacatagatacctcccatttgtttgagtgggtagtttgattttgttaatgtccttggaataatcttgatgggaattaaagagagttgaaaaacaattgctccctaacaataaataaaaaatctggaatctaggatatatcatatagtatagaaaaaccagctctctaattacagtgtaaataacacaaactagagattactgaaaattatggcttaataccaaggcaaagaaatcccttacattaccatcttcttcttcttatagccagataaacaaaatgccattttcagaggccatcatttctacccccttaccttctaaatccttttctgtggttgtatttgtggtcaaaaattgatacatgtgagggggccttatgtgtccggcaggatatagtattttaaattaaggggtaccttatcttttaagcatgggagtgctttttaacaattaaatcgcaaacccctaggtgacagattatgtggcaaaatacacagtgcccctagctactaggaattcagtaacactttttatatttactttattgcagtaatcctatgcctttgaaaagtagtatgtatactgaatgcacaagacgttaatttcgaggccgcactgagagtgcatatggattcatagactccttgtttgtaataaccatttgagttcccggtgaggtccatggcaaacattttgggaaccactgctttaatctgttatttctggtatgttgtataaagatacagtctgattcctgctcttgttttcctccttactctcttgacccataagaaattgcaagatggcaaagatatttttaaattattcagtagatccatcagtatttgagataataagccagaaaaaaagtttttgattttttcattttctacttttttcacactggtagaaggacataataatttaaacatttgtgtacaagtatatttgatttttttctcttttttttgtatgtacaatcagtggggtttacgtttataaaggaaccagtacatagttattgtggcaatgttaaatacttacaaaagtcttttaaaagtcttgtaccttctttacaaaagtcttgcaccttgtgtttgtgtgatgtagtttttctcagtaaatatttcataaacttaactcaaaatctgttgtctcaactggtattttgaaaaatgctatttagattattttagaaagttgtggaaattttgaagcagtttttgactcattcattgagaaaagtaccttttaaaatggagcctgagagtttgtacaaagaggtgtttgggattttgtaaaatggtgagaaaacctgtgaatttccattccttcattggtcttgttcttgaatgtgctcagaatttgtgttgaatgttaatcattgacagaaatgcaaatgctccttttagatttgtcattgacactctttttctaagcatcccttcagtagtaatccaggatccttgagaactggaagaaaacaccatctttttttttttatgcaaagattattcaatactagaatgaatattattgtggtaatggattttgtttttatcctttcagggtttgaaagtattcttgaagggctgtttggacctgcattattaaaagatctcagtttatttaaagactgtgaacctgaaagcatttctgattggacttttgatgaaaactgtttattctgttgcttgagaagagataaagtaaag

SEQ ID NO: 1169 - DNA, 267 bp, Homo sapiens
  full length sequence of bloodCirc_11792
attgtgcttcaagaagaccatagggaagaacgcattttcatcttgctgcaaaagttgcaatagaagatctgaaggtttgaatgggccaatgagtatcctcatcattgaagcattctatggaggctcccataaacagctggtggatcttcttcaagaagagttaggagactgtgtcgtttatacccttcctgcaaagaaatggcattggagagcccggacatctgctttatatttctctcagaccattcccatcagtgagcattacag

SEQ ID NO: 1170 - DNA, 201 bp, Homo sapiens
  full length sequence of bloodCirc_03028
ttacaaattataatactgtggtagaaacaaattcagattcagatgatgaagacaaactgcatattgtggaagaagaaagtgttacagatgcagctgactgtgaaggtgtaccagaggatgacctgccaacagaccagacagtgttaccagggaggagcagtgaaagagaagggaatgctaagaactgctgggaggatgaca

SEQ ID NO: 1171 - DNA, 183 bp, Homo sapiens
  full length sequence of bloodCirc_11627
gatggcttaaattccttggtccttgatttagattttcctgctttgaggaaaaacaagaacatagataatttcttaaatagatatgagaaaattgtgaaaaaaatcagaggtctacagatgaaggcagaagactatgatgttgtaaaagttattggaagaggtgcttttggtgaagtgcagttg

SEQ ID NO: 1172 - DNA, 549 bp, Homo sapiens
  full length sequence of bloodCirc_09942
aaggtgacaaagtacaatttgaagaatttgcaaaagtagtaaggaatatgcgtgatgctgccaggttagaagagttacaggaagttgtcttagctgctgatttgctggaaggtgacatgatagctgggaagaacttggaagactttctaagaaatgttgggattaagtcacctaaagaagaggtagagaaaattcttcaatcagattttgtttctgaagataacatggtgaacattaaagactgtatgagggctttgagggacacccagaaattttccaattatattgatttcaggaaagaggcttcaaatctaaaattaccaaaggtaaacgagattaaagaagctgctaacatcttgtcacatgtcgataatggcaagattggtatacctgatttggagcatgccttgaaatgtttgaatgttaatttaactgaggaggacttcaatgaagcccttaactgttgtaacgtcagtgataatatggaggtggatttaaaagatttcttaatgaaaatgaaagaaagtccacatttccaaaagtccaagg

SEQ ID NO: 1173 - DNA, 399 bp, Homo sapiens
  full length sequence of bloodCirc_10858
gctttgatgacagtagggaaagaaccatttcctaccatttacgtagattcacaaaaagaaaatgagaggtggaatgttatttctaaatcacagttgaagaacattaaaaagatgtggcatagggaacaaatgaagagtgaatcccgggaaaagaaagaggcagaagatagtttacgaagagaaaagaacctggaagaagcaaagaagattaccattaaaaatgatccaagtctcccagagccaaaatgtgtgaagattggtgcgttagaaggatatagaggccaaagagtaaaggtgtttggctgggtccacaggctgcgcaggcaaggaaagaatttaatgtttctggtgttgcgagatggtacaggttatcttcagtgtgtcttggcggatgagttg

SEQ ID NO: 1174 - DNA, 215 bp, Homo sapiens
  full length sequence of bloodCirc_07253
gtgcagttacctttagcagccaaggacgagtaaatccctttaaggtatcagccagttccaaagaaccagccatgtcaatgaattcagcacgttcaactaatattttagacaatatgggcaaatcatccaagaaatccactgcacttagtcgaactacaaataatgaaaagtctcccattataaagcctctgattccaaagccgaagcctaagcag

SEQ ID NO: 1175 - DNA, 220 bp, Homo sapiens
  full length sequence of bloodCirc_21408
gatctcccagccatccagccccggctagtggcggtcagcaaaaccaaacctgcagacatggtgatcgaggcctatggacatgggcagcgcacttttggcgagaactacgttcaggaactgctagaaaaagcatcaaatcccaaaattctgtctttgtgtcctgagatcaaatggcacttcattggccacctacagaaacaaaatgtcaacaaattgatgg

SEQ ID NO: 1176 - DNA, 1909 bp, Homo sapiens
  full length sequence of bloodCirc_01316
actggtgaattgacaaaatgtaattctaaattattgattgggaaaagaagcaaggaagaccgtgtttcaagatacacttaaaggtgtatccattattgtttaaataacgttttttttgggggggggggtttttgttgttgttgttgtttgagactatctcactctgtcacccaggctggagtggagtggcatgatcttggctcactgcaacctccacctcccacattcaagcgattctcctgcctcagcttcttgagtagctgagagtacaggcatgtgtcaccacacccgactaatttttgtatttttagtagagatgaggtttcaccatgttggccaggccagtcttgaactcctgacctcaggtgatccgtctgccttggcctcccaaagtgctgggattacacgtgtgagccaccatgcccagcctactcaaataacgttttttataatacagagaatttataaggtagagctgttctgtctaaacagtagccactaactacatgtgtccatttaaattcaaatgtaaaataattcaaattaaataaatcaagttcctccagcttactggccacatttcaagtgttcaatagccacttgtagtgagggctaccatattagataacacaggtatatagcatttccactgtcacagaaagttctgttggacagttgatatagaggttggaaaagaatgatttttttttaaatgagtgcttaatgaaaatagtcatttaagttggtaaaccggatcataaatcacaaaatgctttgcccttgatatataatattagctgccatttatgaggtactagctaagtgtcagattcagtctaaatggtttatagtcattttctcttcctcttatttcatccttgggtaaggaattctgtaaggcagataccttaatctttgtttgatagttggaaaaattgagatttagagaggttaatttaatatctcagaatcatagctaagtgactgagccaagatttaaatctaagtctgtcagactactgctcccattcttaaggctttgctcttaactactgcactccttgccatatattgcacttctcctgtgcatccccccaaatattattaatcacatttgagtatctcttacattccagaaattttaaatgtatttctaattcttacaagaattctaagaaccctgttaggtagatactaatctccttttgtagatgtgggaactcaggctaagagttgttaaataacttgccaaagacattaaagcttgtgagtgagaaggacctaaactcattatctggagcctattctgattttggttttggtttgtttgttttttgaaatgatctcactccatcacccaggctggagtgcagtggtgcagtcataactcactgcagcctcttaactcccaggctcaagcaatacttccccctcagcctccccagtagcaagtaaaaaaaaatgtagctgggcctggtgtcacaggtctgtggtcccagctactcaggaagctgaggtgggagagtctcttgaccccaggcggtcagggctacagtgatctatgattgtgctactgtacaacagtacagagcctgggcaacagagagaccctgtctcaaaaaaaaaaaaaagatttacaaatgcattcacttcttatttttaaagttagtgatgtgatcttcaaagaagttttgtcagttatttaaccttttttattattattactctaatctgttttgaaagaataatttgtggacctctttgttttaggaggcagttcccatgttatacgcagcagatacttacggagcattgtaatgaagtgtggttctgtaaattctctaatgatggcactaaactagcaacaggatcaaaagatacaacagttatcatatggcaagttgatccg

SEQ ID NO: 1177 - DNA, 580 bp, Homo sapiens
  full length sequence of bloodCirc_06007
attttcacccgatggaagactaattgtgtcatgtagtgaggataaaactattaaaatttgggataccacaaataagcaatgtgttaataacttctcagattccgttggatttgcaaattttgtggactttaaccctagtggtacatgcatagcttcagcaggttctgatcaaactgtgaaagtctgggatgtaagagtgaacaaattactacagcattaccaagttcacagcggtggagttaattgcatatcattccatccttcgggtaactatctcatcacagcttcttcagatggtacccttaagattctggacctcttagaaggaaggctcatctatacacttcaaggacatacgggacctgtctttactgtttcattttcaaaaggtggagagctatttgcatcaggaggtgcagacacacaggtcttattatggaggactaactttgatgaattgcattgtaaaggtcttaccaaaagaaatctcaaaagattacattttgattcaccaccacatcttcttgatatctacccaagaacaccacatccccatgaggaaaaagttgagactgtagaa

SEQ ID NO: 1178 - DNA, 202 bp, Homo sapiens
  full length sequence of bloodCirc_07054
gtttacaaaagatactgcaaggttcaaggatgagttagatatcatgaagttcatttgtaaagatttttggactacggtattcaagaaacaaatcgacaatctaaggacaaatcatcagggcatctatgtacttcaggacaacaaatttcgcctgcttactcagatgtctgcaggaaaacagtatttagaacatgcatctaag

SEQ ID NO: 1179 - DNA, 314 bp, Homo sapiens
  full length sequence of bloodCirc_18441
aaatttcaagatattgaagaaactcatctcattcacataaaggaaattataggatccttgtcaaatgctataaaggaaattcatttgcagataggccaggtccatgaagaatttataaataacatggctaatactacagttgaaagtttgatacaaaaatttgctgagtcaaaaggcactgggaaggaaagacctggcctcattgaatttgaagaatgtgacactgctagtgcagttgaaggtataaaaccaaggaaaagaaagacctttgctttgccaggaatcattaaaaaggaaaaagatgcagaatctgt

SEQ ID NO: 1180 - DNA, 202 bp, Homo sapiens
  full length sequence of bloodCirc_00400
gtgaagacattcagtgaagcttgcctgatggtaaggaaaccagccctagaacttctgcattacctgaaaaacaccagttttgcttatccagctatacgatatcttctgtatggagagaagggaacaggaaaaaccctaagtctttgccatgttattcatttctgtgcaaaacaggactggctgatactacatattccagatg

SEQ ID NO: 1181 - DNA, 700 bp, Homo sapiens
  full length sequence of bloodCirc_02388
aaatggaatctagttcatcagactactataataaagacaatgaagaggaaagtttgcttgcaaatgttgcttccttaagacatgaactgaagataacagaatggagtttgcagagtttaggggaagagttatccagtgttagtccaagtgaaaattctgattatgcccctaatccttcaaggtctgaaaagctaattttggatgttcagcctagccaccctggacttttgaattattcaccttatgaaaacgtctgtaaaatatctggtagcagcactgattttcaaaaaaagccaagagataagatgttttcatcttctgcccctgtggatcaggagattaaaagccttcgagagaaactaaataaacttaggcaacagaatgcttgtttggtcacacagaatcattccttaatgactaaatttgaatctattcactttgaattaacacagtcaagagcaaaagtttctatgcttgagtctgctcaacagcaggcagccagtgtcccaatcttagaagaacagattataaatttggaagcagaggtttcagctcaagataaagttttgagagaggcagaaaataagctggaacagagccagaaaatggtaattgaaaaggaacagagtttgcaggagtccaaagaggaatgtataaaattaaaggtggacttacttgaacaaaccaaacaaggaaaaag

SEQ ID NO: 1182 - DNA, 648 bp, Homo sapiens
  full length sequence of bloodCirc_00200
ggaagaggaagaacgtctgagaaataaaattcgagctgatcatgagaaggccttggaagaagcaaaagaaaaattaagaaagtcaagagaggaaattcgagcagaaattcagacagagaaaaataaggtagtccaagaaatgaagataaaagagaacaagccactgccaccagtccctattcccaaccttgtaggaatacgtggtggagacccagaagataatgacataagagagaaaagggaaaaaattaaagagatgatgaaacatgcttgggataactataggacatatgggtggggacataatgaactcagacctattgcaaggaaaggacactcccctaacatatttggaagttcacaaatgggtgctaccatagtagatgctttggataccctttatatcatgggacttcatgatgaattcctagatgggcaaagatggattgaagacaaccttgatttcagtgtgaattcagaggtgtctgtgtttgaagtcaacattcgatttattggaggcctacttgcagcatattacctatcaggagaggagatattcaagattaaagcagtgcaattggctgagaaactccttcctgcctttaacacacctactgggattccttgggcaatggtgaatttgaaaag

SEQ ID NO: 1183 - DNA, 132 bp, Homo sapiens
  full length sequence of bloodCirc_05156
agatataagatcaaggtacttagttcttgagaactgcccctcaaggaaaactttattcttgggatgatggatgcttccaatggaaacccttttgatatataacttctttgatgatggaaaaatttgtgaatg

SEQ ID NO: 1184 - DNA, 4350 bp, Homo sapiens
  full length sequence of bloodCirc_02650
ggggtaggacagttcactaaatagcaacttagaaaaacaggatctaggaatttctgtgaaaaaatgagctgggattatacagctgtgaaggtgagatcagaagctttagtggtcagacagctgagataagacagcacaaatgatacaactcttggttagccagctccttctccacgtagataatgtataatcatcagtcttcacataaaagctatcttgcaatttgtgttggaatggctatcacttgtgtttgtcttttacttttaaggaacaaatgaaccactacaactcttttggcctcttaagcatggcttaaagattgtaaatgcatttaacccctttatatatgtggttacatatattaatgttacttttataatttcctttctgcatttcattggaaaagttttggtttttcatattaaaatactgtaaaatatattcatacaaagactatgtgtaatatgttacataaagactgacataatgatgtccatcccatcctctcctcagtttaagtgaaagaacattcccagtaccctcctggatcacctctgtctacctccatcctaccactggcttgaggaaaccatcggcatcactgtgggctctggcattcctttgcttttctttatagtatgttacatatgtgtatgtctcttaacaacgtattgttaattatacatattttggactgttatataagtggtatctttacgtgtgtgtgtatgtgtgtacagtatatataataagtatatatcagtaatacttgtgatatttgttgatgtgcatacccatagttcattcatttcactgcttcatagtacttgattatataaacatgatatcattacttacccttttgttgatggaaatttcagtttctttgctattatgaatagcattgctgtgaacatttttcagtatatatcttagcacacatgaaagactttctatagccacatgtctctcttttggttagagtttgcctgataagctttttttttttctttgagatagagtcttgctctgttgcccaggctggagtgcagtggtgcgatcttggcttactgcagcctccacctcccaggctcaagcaattctcttgcctcagcctctccagtagctggcattacaggcggctgccaccacgcccagctaatttttatatttttagtagagacagggtttcaccatgttggccaggctggtcttgaactcctgacctcgtgatccacccgcctcggcctcccaaagtgctgggattacaggcgtgagccaccgtgcccagcctgataaacatttttaatgcttatttctcacctttatgtgttttgctgatttaggtgtatttcttatgaaatatggctagacttttaaaatagtctttttaactagaaaatttttaaatttgaatttaaaattactatctttactgtctgtattagtcatctttggctgtaataatgctgtgtaacgactgcaaactttcagtgcacaacaccagacgtttctttctagctcactggtctgcgctctctgttgagtttggctgggtttggctgtaagatgtgggttggcttcagttacatgttaggttatttattcattgtgggccattgctacctggggcatacatttcttgttctgcatgtaggagcacaagggaaggcaggctgcctcagtgctcctcaagcctccagttagaaccattccagcaagtcatatggccacgcccttagacttagagtacctggaaaatgagatgaaaggccaatttttgcagaaatatcccaatataatttgatgtgaaattatgggtttaagacattactttttccctgttggatggtgtgaaaaacagaaagtaaggtttttcttctttcacctctgtatgtttagtgcaaaagtagcatttaggggaggagaaagggagtctaaacattttctcctgtgtgctgctcaactaccttgttccatataacaattggtagactccttactttgaaagtaggtcggaggggctgggcatggtgcctcgcgcctgtaatcctagcattttgggaggccgaggtgggtggatcacgaggtcaggagatcgagaccatcctggctaacaccgtgaaatgctgtctctgtgaaaaatacaaaaaattagccgggcgtggtggcaggtccctgtagtcccagctactgcactccaacctgggcgacagagcgagactacgtctcaaaaaaaaaaaaaaaaaaaagtaggttggaggatctatattttaaagctgtgattagtgtaaataaagaatcctgaacgcgtgacttcagttatgtcatttataaatgtttctaagaactaatccatgacattccaaaacatgcattatttagttttgcaaactataaaatttgtgtacatttattacctcagatggtaagattataagtctagtgtttataagttttattatactggtgtttttgaggttactatttttggtgctgagaaaactcttgatgtcttaagaactgaaatccttgaataagtatttctttggctccttttggttagaggcaggaagcagtgtgctacatcgcacaaggtgctttaatgttaccatttaggagttttaaatttaagattaaaaaattttgtataaacataaagagaaaagtccctggtcaaagcgactagactctacaagtataaatttaagtggactcttgggtcatctgtgaacgtttaatcctgccttatttgtaacacgggactgtcttgccttgtcagcagtcagcatgctccaggtccacatgtcctacctcagagtttcctaggcaggaaaacaaatctaaatagtcagttaagcaccatcaagaaagtatatttcttgtgagaaactttcatcatgtattctaaaactagcatgtgggttatatgttttagattttccatacaacttctcacttcctttgggataattgcattatctggaaatggaaatcatttaagtggacagataaagaggaaagcatgtgggttgggggtcagggtattacgtggcagcactgtgattctatgccatgctaattacagtgtgcgggccatgctgggcacgtaagtgctgatgcagtctgttttcattctgcaaatgaaatacttctcatgtatattacatgacgcaagtacagtatatagatgtggcaagcagtatttcttcaaaaagtatttccctaactttgattctaaagcagaggtctctagtagtagtatactgttttcttaattgatttagaaaataaccatcacctattgtgattggaagaagtagcttatttgtttatgaaggaaactacatgtgaggtagtacaggtgtacattttgtgttgagtctgatcttatctgtggaattttatatgatagatttaggtaggcatttgtgcatccatggttatgtttaaatatagcattaatatttatacctatattaatattttagaaatacagtaattaagaaaggaagatttataaagtaaatcttagcaaagggttaagtttgtattaatactaacacaagttgatgttttatgttatgctcttaagtggaaaggaacaagtacaaaattttatgtgtagtatcaagtatatttttaaaatacttagaaaaaaaatggcttgaaaggaaatatgtcccaaatgattgggtagatgtaggggttagggtaatatgttatgagagaagtttaccttattgttattctttttgtttttaaaacaatgaacccatattacttttataatgaagaaaatattcattgctagagaaagtctatagcaataactttgctgatccttatttgaagtcttacattaatcatttatgtgcagtcaaaatatactcagcagggatgatgtgggctgtatttaccctagatggagtgccttctacctgtgattttcttagctgggaatggggaagaaatgtttttagtgttgaagacgaaggacacctgttagtaagtttctatgtggtgattacttactacatatcacttaaatttgaagtaacttattccaaaagaggaaaacacgaattcaacaggatattctaaaagttgattaataatcttttatatttaataggtgatcacaagagttctttttggaaatagtagaatatttttgaaacaaaatgattttctttaagaaaactttattttaaatattgacctctagaaaatactatttctttctctttgtttcctgactaggacatgtattcctctgagaaaccttggacagcagattttggtttaatatctgattgggacaacattcagacccatttccagtcatga

SEQ ID NO: 1185 - DNA, 232 bp, Homo sapiens
  full length sequence of bloodCirc_05799
gtccccaggtgcatccaatttttcaactttaccaaagatctctccttcatctctatcaaataattataacaacatgaacaacagaaatgtgaaaaactcaaattactgtcttccatcatataccgcttataagaactatgattattcggaacctggaagaaacaatgaacagccaggcctctgtggcctaagtaacttgggaaatacgtgtttcatgaactcagctattcag

SEQ ID NO: 1186 - DNA, 279 bp, Homo sapiens
  full length sequence of bloodCirc_09092
tgaattgatttttcttgagcagattgattagatggagctgccttgatttacacatcagtgaaagaagagaaaaacctcgacttgttgtataagtatattgttcataaaacatacggtttccacttcaccacacctgccttagttgtggaaaaggatgccgtttttatacctgcaggctgggacaatgaaaagaaaatagctattttacatgaaaattttacaaccgtgaagccggaagatgcatatgaagactttattgtgaaacctcccgtgagaaag

SEQ ID NO: 1187 - DNA, 308 bp, Homo sapiens
  full length sequence of bloodCirc_10929
atggagttttaacattgaatgcggagaacactaattatgcctatcaagttccaaacttccataaatgtgaaatctgtctactatcttttccaaaagaatcccagtttcaacgccacatgagggatcacgagcgaaatgacaagccacatcgatgtgaccagtgcccccaaacatttaatgttgaattcaacctgacacttcataaatgcacccacagcggggaagatcctacctgccctgtgtgtaacaagaaattctccagagtggctagtctcaaagcgcatattatgctacatgaaaaggaagag

SEQ ID NO: 1188 - DNA, 149 bp, Homo sapiens
  full length sequence of bloodCirc_21056
gatgggtcatcagttaaggaagttgaaacctaccaccggacacgtgctttaagatctttgagaaaagatgcacagaattcttcagattctagttttgagaagaatgtggaaataacggagcaacttgctaatggcaggcattttacaag

SEQ ID NO: 1189 - DNA, 1084 bp, Homo sapiens
  full length sequence of bloodCirc_01937
gtcttcccaaaagttatcttctgggaagatgccaatacatgatcacgactctggtgttgaagatgaagatttttctccaagaccaattcctagtcctcatccagtgagtcagaagatttctaagatccaaccatcagttcctgaactttcacttgtgttggatggcaatttcatagaatcaaaccctctgcctactccattggaaatggtgaataatgaaaatcctcctttgattaaccacttggaacacttgaagccattgcaaccccagctttatgatgagaaacacagtccagaagttgaagctggagagccttccttgagaggaataccaaatcagttaaaccaggataaaccagctcttttgagacactgcaaagtaagacagccacctgcctataagaaagggaacccccataccaggaacagtattaaaccatcttctcataatgggccatctcatgatatatttgaaaagctccaaacagtttctgctggaaatgtacaaaacgaagagtatcctataagaccctccacacttaattctaggcagtcttctcttgccccgcagtcccaaccacacgattttgttttttcaccccataattcaggaagaccaatggaacttcagatacctactcccccactgccatcttactgttccacaaacgtttgcaggtgttgtcagcatcatagtcatattcaatatagtccgctaaattcttggcaaggagcaaacacagttggatccattcaagatgtccagtctgaagcccttcaaaagcattcattatttcacccaagtggatgtccagccctgtactgtaatgcattctgttcttcaagtagtcctatagccttgagacctcagggagatatgggcagttgttctccccacagcaatattgaaccatcgcctgtggcaagaccgccttcacatatggacttatgtaacccacagccttgcacagtgtgcatgcacacacccaagactgagtcagataatggaatgatgggactatctccagatgcatatcggttcctcacagaacaagacagacagctaagactacttcaggcacag

SEQ ID NO: 1190 - DNA, 813 bp, Homo sapiens
  full length sequence of bloodCirc_08702
agatcgagatggtgatcatggagcgtagcaagctctcagagctggccgccagcacctccgtgcaggagcagaacaccacggacgaggagaaaagcgccgccgccacctgctctgagagcacgcaatggagcagacccttcctggatatggtgtaccacgcgctggacagcccggatgatgattaccatgccctgttcgtgctctgcctcctctatgccatgtctcataataaaggcatggatcctgaaaaattagagcgaatccagctccccgtgccaaatgcggccgagaagaccacctacaaccacccgctagctgaaagactcatcaggatcatgaacaacgctgcccagccagatgggaagatccggctggcgacgctggagctgagctgcctgcttctgaagcagcaagtcctgatgagtgctggctgcatcatgaaggacgtgcacctggcctgcctggagggtgcgagagaagaaagtgttcaccttgtacgacatttttataagggagaagacatttttttggacatgtttgaagatgagtataggagcatgacaatgaagcccatgaacgtggaatatctcatgatggacgcctccatcctgctgcccccaacaggcacgccactgacgggcattgacttcgtgaagcggctgccgtgtggcgatgtggagaagacccggcgggccatccgggtgttcttcatgctgcgttccctgtcactgcaattgcgaggggagcctgagacacagttgccgctgactcgggaggaggacctgatcaagactgatgatgtcctggatctga

SEQ ID NO: 1191 - DNA, 141 bp, Homo sapiens
  full length sequence of bloodCirc_00443
ttcccaacctgcctgtccccgataagtgtcagaatggagcagtctctctgaagaccacatactttaatctctgcagccacgtaagaggttccagccagaggctcttttctcctgggaagcctaaaggactactcacccctg

SEQ ID NO: 1192 - DNA, 364 bp, Homo sapiens
  full length sequence of bloodCirc_19873
tcgtgatgagaggagatggattgaaaagcagaacagagcaacaagagcacaaagaaaaaaagaagaaatgaacagaataagaacattagttgacaatgcatacagctgtgatccaaggataaaaaagttcaaggaagaagaaaaagccaagaaagaagcagaaaagaaagcaaaagcagaagctaaacggaaggagcaagaagctaaagaaaaacaaagacaagctgaattagaagctgctcggttagctaaggagaaagaagaggaggaagtcagacagcaagcattgctggcaaagaaggaaaaagatatccagaaaaaagccattaagaaggaaaggcaaaaacttcgaaactcatgcaag

SEQ ID NO: 1193 - DNA, 211 bp, Homo sapiens
  full length sequence of bloodCirc_02286
gtggtggacataatgcgagttaacgtggacaaggttctggaaagagaccagaagctctctgagttagacgaccgtgcagacgcactgcaggcaggcgcttctcaatttgaaacgagcgcagccaagttgaagaggaaatattggtggaagaattgcaagatgtgggcaatcgggattactgttctggttatcttcatcatcatcatcatcg

SEQ ID NO: 1194 - DNA, 154 bp, Homo sapiens
  full length sequence of bloodCirc_07308
cgcgtacttgctttgtaagtgatctgaagcgaggactaaaaatccaagcagcaaaatttaatattgatgggaataatgagcgtccctccccacccccaaatgttgactatccattagatggagagaagattttacatatccttggatcaatcag

SEQ ID NO: 1195 - DNA, 270 bp, Homo sapiens
  full length sequence of bloodCirc_20485
tgtacctgtgtaatgtggacaccacctctccgcgaaagcttctcatatccatttcttgttcttcagatgttgcttgtgactcatattctcagggctacaaaactttatagaggaagtttgattgcactctgcatttccaatttatttttcatgcttccttggcagtttgctcagtttgtacttcttactcagattgcatcattatttgcagtgtatgttgtcgggtacattgatatatgtaaattatggaagatcatttatatacacatg

SEQ ID NO: 1196 - DNA, 211 bp, Homo sapiens
  full length sequence of bloodCirc_00417
actattgcagatatcatccgaacatgtttgggacccaagtccatgatgaagatgcttttggacccaatgggaggcattgtgatgaccaatgatggcaatgccattcttcgagagattcaagtccagcatccagcggccaagtccatgatcgaaattagccggacccaggatgaagaggttggagatgggaccacatcagtaattattcttg

SEQ ID NO: 1197 - DNA, 508 bp, Homo sapiens
  full length sequence of bloodCirc_22727
gcccttcataacacaaggcttttatctgcttattccgccattgatcccagagtgaagtatttgtgctataccatgaaagtatttacaaagatgtgtgatattggtgatgcatctagaggcagcttatcatcgtatgcatatactcttatggtgctatattttctccagcagaggaatccaccagtcattcctgtccttcaagagatatacaaaggtgaaaagaaacctgaaatatttgttgatggctggaatatttatttttttgatcaaatagatgaactgcctacctattggtcagaatgtggaaaaaatacagaatctgttgggcagttatggttgggccttcttcgtttctacacagaggaatttgattttaaagaacatgttattagcatcaggagaaaaagtctgcttacaacttttaagaaacagtggacctcaaaatacattgttattgaagatccctttgatttgaatcataatcttggagctggattatcaaggaaaa

SEQ ID NO: 1198 - DNA, 177 bp, Homo sapiens
  full length sequence of bloodCirc_07807
ggtattaatggcattcttgctgatgaaatgggccttggtaaaacagtacagagcattgcccttctggcccatctggctgagagagagaacatttggggacctttcttaataatttcacctgcgtctacacttaacaattggcaccaggagtttactagatttgttcctaaatttaag

SEQ ID NO: 1199 - DNA, 247 bp, Homo sapiens
  full length sequence of bloodCirc_15663
agaagaagttcgtgccccaattcctcaaaagcaggaaatactggtggaaccagaaccattatttggtgctcctaaaagacgacggcctgcacgttcaatttttgatggtttccgggattttcagactgaaactattcggcaagaacaagaattaagaaatggaggagctatcgataagaaattaactacccttgcagatctattccggccacccattgatttgatgcataaaggcagctttgaaaca

SEQ ID NO: 1200 - DNA, 191 bp, Homo sapiens
  full length sequence of bloodCirc_11682
gaaatcagaaaagttgtacagagtttagaacaaacagctcgagagattttaactctactgcaaggggtccatcagggtgctgggtttcaggacattccaaagaggtgtttgaaagctcgagaacattttggtacagtaaaaacacatctaacatctttgaagaccaaatttcctgctgaacagtattacag

SEQ ID NO: 1201 - DNA, 247 bp, Homo sapiens
  full length sequence of bloodCirc_18087
ggttacacatcattttggaatgactgtatatcatctggattacgtggctgtatgttaattgaattagcattgagaggaaggttacaactagaggcttgtggaatgagacgtaaaagtctattaacaagaaaggtaatctgtaagtcagatgctccaacaggggatgttcttcttgatgaagctctgaagcatgttaaggaaactcagcctccagaaacggtccagaactggattgaattacttagtg

SEQ ID NO: 1202 - DNA, 232 bp, Homo sapiens
  full length sequence of bloodCirc_15886
ggctgaaaacacagttaaatcactttcaaagttaaaagactattaagaacacaagatggggactcctgcttctggaaggaaaagaacacctgtgaaagaccgattttctgcagaagatgaagctttgagtaacattgccagagaggcagaggcaaggctggcagcaaaacgggctgcccgggcagaagcaagagatatacgcatgagagaactggaacgacaacaaaaagag

SEQ ID NO: 1203 - DNA, 716 bp, Homo sapiens
  full length sequence of bloodCirc_15146
gtgattttacaacgagatgctgctctccatagggatgctcatgctgtcagccacacaagtctacaccatcttgactgtccagctctttgcattcttaaacctactgcctgtagaagcagacattttagcatataactttgaaaatgcatctcagacatttgatgacctccctgcaagatttggttatagacttccagctgaaggtttaaagggttttttgattaactcaaaaccagagaatgcctgtgaacccatagtgcctccaccagtaaaagacaattcatctggcactttcatcgtgttaattagaagacttgattgtaattttgatataaaggttttaaatgcacagagagcaggatacaaggcagccatagttcacaatgttgattctgatgacctcattagcatgggatccaacgacattgaggtactaaagaaaattgacattccatctgtctttattggtgaatcatcagctaattctctgaaagatgaattcacatatgaaaaagggggccaccttatcttagttccagaatttagtcttcctttggaatactacctaattcccttccttatcatagtgggcatctgtctcatcttgatagtcattttcatgatcacaaaatttgtccaggatagacatagagctagaagaaacagacttcgtaaagatcaacttaagaaacttcctgtacataaattcaagaaag

SEQ ID NO: 1204 - DNA, 375 bp, Homo sapiens
  full length sequence of bloodCirc_23244
ggcaaaacatcagaggctcttgcaaagttaatttcactacaagctacagaagcaactattgtaactcttgattctgataatatcctcctcagtgaagaacaagtggatgtggaacttgtacaacgtggagatatcattaaagtagttccaggaggcaaatttccagtggatggtcgtgttattgaaggacattctatggtagatgagtccctcatcacaggggaggcaatgcctgtggctaagaaacctggcagcacagtgattgctggttccattaaccagaacgggtcactgcttatctgcgcaacacatgttggagcagacacaaccctttctcaaattgtcaaacttgtggaagaggcacaaacatcaaag

SEQ ID NO: 1205 - DNA, 241 bp, Homo sapiens
  full length sequence of bloodCirc_07646
tccagttacaacacagggatcacaacaaacacaaccgccacagaagcactatggcattacttctcctatcagcttagcagcccccaaggagactgactgcgtacttacacagaaactaattgagacattgaaaccctttggggtttttgaagaggaagaggaactgcagcgcaggattttaattttgggaaaactaaataacctggtaaaagagtggatacgagaaatcagtgaaagcaag

SEQ ID NO: 1206 - DNA, 401 bp, Homo sapiens
  full length sequence of bloodCirc_09875
tgaaggtggtgtttttaaggctcatcttactttcccaaaagattatcccctccgacctcctaaaatgaaattcattacagaaatctggcacccaaatgttgataaaaatggtgatgtgtgcatttctattcttcatgagcctggggaagataagtatggttatgaaaagccagaggaacgctggctccctatccacactgtggaaaccatcatgattagtgtcatttctatgctggcagaccctaatggagactcacctgctaatgttgatgctgcgaaagaatggagggaagatagaaatggagaatttaaaagaaaagttgcccgctgtgtaagaaaaagccaagagactgcttttgagtgacatttatttagcagctagtaacttcacttatttcagg

SEQ ID NO: 1207 - DNA, 206 bp, Homo sapiens
  full length sequence of bloodCirc_01638
gcggataaaacggtcccatcaagactgagaaaaagcacaccagctattggcacagcgtgggcagtggggcctacaggatgactgacttagtctacagagatcccggcgtacttaagcagatgaagactcttaagatgacagaaggtgatttttctggtgatcgaggacttccggggtaatgacagtgatgaaatgcaggggacctg

SEQ ID NO: 1208 - DNA, 14662 bp, Homo sapiens
  full length sequence of bloodCirc_20189
gcatccaattcttctggagtccctttttgctattttgtcaacgacctatactctgtcagtgatgttcagtataattcccatggggccacagctgacatctccttaaagtcttccgtttatgccaatgccttcccctccacacccgtgaacccccttcgcctggatgtcacttaccataagaatgaaatgctgcagttcaagatttatgatcccaacaagaatcggtatgaagttccagtccctctgaacatacccagcatgccatccagcacccctgagggtcaactctatgatgtgctcattaagaagaatccatttgggattgaaattcgccggaagagtacaggcactataatttgggactctcagctccttggctttaccttcagtgacatgtttatccgcatctccacccgccttccctccaagtacctctatggctttggggaaactgagcacaggtcctataggagagacttggagtggcacacttgggggatgttctcccgagaccagcccccagggtacaagaagaattcctatggtgtccacccctactacatggggctggaggaggacggcagtgcccatggagtgctcctgctgaacagcaatgccatggatgtgacgttccagcccctgcctgccttgacataccgcaccacagggggagttctggacttttatgtgttcttggggccgactccagagcttgtcacccagcagtacactgagttgattggccggcctgtgatggtaccttactggtctttggggttccagctgtgtcgctatggctaccagaatgactctgagatcgccagcttgtatgatgagatggtggctgcccagatcccttatgatgtgcagtactcagacatcgactacatggagcggcagctggacttcaccctcagccccaagtttgctgggtttccagctctgatcaatcgcatgaaggctgatgggatgcgggtcatcctcattctggatccagccatttctggcaatgagacacagccttatcctgccttcactcggggcgtggaggatgacgtcttcatcaaatacccaaatgatggagacattgtctggggaaaggtctggcctgattttcctgatgttgttgtgaatgggtctctagactgggacagccaagtggagctatatcgagcttatgtggccttcccagactttttccgtaattcaactgccaagtggtggaagagggaaatagaagaactatacaacaatccacagaatccagagaggagcttgaagtttgatggcatgtggattgatatgaatgaaccatcaagcttcgtgaatggggcagtttctccaggctgcagggacgcctctctgaaccaccctccctacatgccacatttggagtccagggacaggggcctgagcagcaagaccctttgtatggagagtcagcagatcctcccagacggctccctggtgcagcactacaacgtgcacaacctgtatgggtggtcccagaccagacccacatacgaagccgtgcaggaggtgacgggacagcgaggggtcgtcatcacccgctccacatttccctcttctggccgctgggcaggacattggctgggagacaacacggccgcatgggatcagctgaagaagtctatcattggtgcgtgggtccttccccagggcctttgccgacagggcagggagttgggatccttagggaagaggtgaggaggcagatcatgagagcctggtgtgacacagctgtgcttctcgttgcaggcatgatggagttcagcctctttggcatatcctatgtgagtgtccttgggatcctcctaagcaccaagaaggtggggacatctttcagaaatcatcagcaggctccttttatttcctcttgtttcagacgggagcagatatctgtgggttctttcaagacgctgagtacgagatgtgtgttcgctggatgcagctgggggccttttaccccttctcaagaaaccacaataccattgggaccagggtaggacagtggcttctacctccactgttttatgtcacttgaaagacagtctccatttctgtgctaaaagtaatgcagtctctatttcctgggatatctttaaaaaaaggtgtttttttttgttttgttttgttttgtttttttttttgaaacagggatttactctgttggccaggctgaatcgtgcagtgtcccaatcatggctgactgcagcctccacctctggggctaaagcgattgtcccacgtcagccttctgaatagctgggataaaggcacatcccagcgtggctacctaatttttgattttttgtagaaatgggatcttgccatatttcacaggatggtctcgaactcctgggctcaagcgatccactcgacagcctccaaaagtgctgggattacaggcgtgagccactgcacccttaaaaattgtgaagacctggtgtctcaatgaaccatattcctcattgtgctttagattattatttttttcctgtatttcaggcagaattttaccaaatgttccaaaaagaatgtcttacagtgaaattttatcagctgtcttaggagagctttggtgactctttccggtctattaagaatattctctgggcctcatgtatagttttcttttgtttagctgtgagtgatcttcaattggagtatgcttttagtgaccttcttaaatcccctagaaattccagggcgagctcccaacactgttctctttctcctttagagacaagaccctgtgtcctgggatgctgcttttgtgaatatttccagaaatgtcctgcagaccagatacaccctgttgccatatctgtataccttgatgcaaaaggcccacacggagggcgtcactgttgtgcggcctctgctccatgagtgagtgtccagcagggatcccgatgactaatggatgacttattgcattctatgtggtagcagttgatatacacaacgcttccaaattaaagacatgatggccttttgacatgagctcttcagacacaaagtatacctgattactgtctttagcacagtgttatacataccgtaggtcataaaaaaagggtatttattgaatgacgaaaattgaaatgatgcagtacagcatagaatagtttcattctaatttggttgtgcaaaggcctatcttatgtagcagttttgttatatggacccaggtcacaaaagaaggatttcagcaagagaattgagggacgagggccatcctcacatttaaaatgtgccatggttaagaaatgaggtaatattttacaggagagaacacatctacatcccagcatttctgaagtttgaggcacatcccatggggaaagcagaggctgggtgctcctgatgaagctaggcctaggaacaaagcaaggatggctcaggggcagctgtatttccgacttggatctgaacttgaggagcttcttcagagtgtcgggctggggctctgttgggctctgttgggcaccttcatttccctttccaggtttgtgtcagaccaggtgacatgggacatagacagtcagttcctgctgggcccagccttcctggtcagccctgtcctggagcgcgtgagtatggaggcctccgatgaggggaggatcccagctgtgaggcttggggaaaaggacgaggagaagaggcctgagctggtgggggtcctgagacatggtttcttattctacctgtgtctcttcctctctttctgagctgaagtccatcacttaggtgttcttggcactcagctccttcatctttaaaatgagcctaacaattctggttcgtaggatgatcaagaagaaaacacctcatggaatagtcaatgacacaatcatttcttcgttaactaaaataattaatagaaggtcagatgggggcagtattgtaaaaaatttataacagtcctctagcactattacaacttttcagaaggatgacttggcaatgtgtgtacttgtattgctgctggctaacccttcccttcctctacaggagctcctcccagcagtaaaagccatttctttacttctgttgttgattaggcttctgattaaaatatcaattaattgtacctccctcaaatatatatatatatatatatatatatataaatatatatatatatatatatatttttttttttttttttttgagacagagtctcactctgttgcccaggctggagtgcagtggcatgatcttggctcattcaacctctgcctcctgggttctagtgattctcttgccttagcctcttgagtagctgagactacaggcatgtgccaccattcccggctaatttttttttctttttttgtatgtttagtagagatggggtttcactgtattagccaggatggtctcaatatcctgacctcatgatctgcctgacttggactcccaaagagctgggattacaggcatgagccatcgcgcccggccccaaaatctcattatacccacaaaattttcttctgccccagacacaacctcccttgtttgtctctttaagagtcaaaggggtaagtctatgtctataagcaaacagtgatttattttttcccgaagtcctggatatcaaagtgctttatgaaagccacttgttttgggtagacaaatctctggtttaaaaaagaaaacaggaagaaggttgccccagttgttaacctcttgggacatgaggcagctgggtccaaagccatcacaattatttcacctctttcctaagcagtttggttactctgtcctggaaaatggtggcactgcctcaccttgtttgtgtttcattttagaatgccagaaatgtcactgcatatttccctagagcccgttggtacgattactacacggtaagtttttctgaatgtttatataacacgggaatgtggtagagagtacaaaggctttaggtccgatagaccttaggtcaaatgctggctctgtaacccacctgctgtgtggtcttagagaagccactttaacccttgtaatctcagttttctcacctccaagtggggtaagaccactttcctcatagaaccattgtgaaataacacataaagcatctcactcagggtctgtttttttgtgggtgttctctttgtgttagtttttaatatttctttatatcactgctatttacaatgttgtgtaaaggcagatgctagccaacatctgagattgtgttgcaaactatagtttttgtttttattgttgatatctttgcctgctgtaagtttgtaagcatagaggccgttttgtctcttttgattaaatacctccttccatagcatagatgctcaaagaggggcgctgcacataattacataaggcacacaagtgattaggcaatgtgcaaaacacacacagaggtatgggacccaacccttgtgtgtctaagtagtgcaagtgcatttagaaatgaggaagcaatgaagagctccttgccgcatagtttcattgctagtatgattcccaaagactcagctgggaagccagggtcttcccgggcagctctggggtggtgggctcttgctgggaccctgacaaatcagaccctgattcttggggaagaatcaaaggaggtatttccttcgtttctaactaggcctcttcttctgactttctgaggagaacatagttgagggctggaaatacaacaaaggggtacaagcagggatacaggaagcagagcatgtgctggcccctttcatccaaggagatttcagtgagattaagtgaaaagtggagaaggatgtgcaattttgttccttctcttctcagtccattggagcccaagtcctctccacagccccagactcctcttcctgctgctagtctggatctgcccttagggtggtaacatgttaaggctctgctatgtgtgtcccagccaggcgtttcccaggaagaggtggccagctttctttacgtgagactggcctttgtcctgagtgtgcatgttgagtctcccattcactaccagaagatatctttgatggaagagggaaagacaaaagaagtcatggagcaagctgtttagaaaaagatgaaattgggccaggtgtggtggctcacacctgtaatcccaggactttgggaggccgagatggacagatcacaaggtcaggagatcgagaccatcctagctaacacggtgaaaccccatctctatgaaaaataaaaacaattagccgggtgtaggggcatgcacctgtagtcccagctactcgggaggctgaggcatgacaattgtttgaacctgggaggcggaggttgcagtgagctgagattgtgccactgcactccagcctgggtgacggaaccagactttgtctcaagaaaaaaaaaaaaaagaaagagatgaaatttttaatgtttaattaaaatgaagatgaatctcataattaggattaatgaagaagtgtcaccttaattaatcttcccaagtttgggtaactattactcattctagagcacaagctggcaaactatggcccacagccaaatctggttgttagctgatttgcaaataaagttttagtggaacacagccatgcatatttgtttgcttgttgtcaacaataactgcttcttacctgtaaagtagcagctctgaaatgagaggattttgcctaccaggggacatttggcaatgcctggagatatttttggttgtcacaacaggctgggggtgaggaggctatgcggctgacatctgaggattctgctaaatatcaaaaggcacaggatagccccatcgccagagaattgtctggccccaaatctcaatagtgctgagactgaaaagccctgctctagttgagaacatgtaggatggaaggatggtcccttaggttctgatacaggtgagagtgtagcagttcttcctgttacacatcaggcaaatgtagtttgtatggtggaagcaaaggtaagagaccctaacaagatattatagcagccttgcgaggttttatgcagcactgtgcgaatgcagaatgggtaatagcaggtatgttgcaaagggtgatgaacaggcataagttcagaggggaggatgagatgtctggcaggatgcattgttcagggaggggcctgtcctctccttcatcatcttttaccttcttctgcccccagggtgtggatattaatgcaagaggagagtggaagaccttgccagcccctcttgaccacattaatcttcatgtccgtgggggctacatcctgccctggcaagagcctgcactgaacacccacttaaggtgaatgacaggactcaggttttcctttacatttcagttagctcaacaatttgtgatgaagtctaccaaaatgtaagcatcactttcaaacccacatgcaattctactcaacacttgttttttctttgttttgttgtttgtgtgttaatctttttcagactctatactttttgtctaattattaacaactcttttaagtctaagggagtgagatgaaaggtctaagaatgtcattttttaaatctcacatctgacatggaagtcaaaataagagcaaccacaattcacaagagcttttcagaagctgttgttttagaactgtatccagtagattttgaaagactgtaattcatgtccttccttaaaccctttgaatttcttttcaaacacgctaacagccaggtggtcagcctccttggtttgccaggactgatgcattttagcaccagaactctcctctcttgagatgcttctcaattctgggtaaaccaggtcagttgatgcctctatctgccttggccacactgctcacccatgtttctttactcttgaatcacttattctcattttaggagggtcaggatccactttccaccctcctagaatctcaacttcctctttcttttctcccgctaagagatttctttcttgtgattcaaaagtggattcaaaaaaaccctcaaaagtctatgtcactgaattttgctttatacgtaattgattccaaaattatagattccatctgtactaaagaggtgtgcatttatatcttcatgcctttgagagtattaacctatttgtctttaatagactaggagttctttggaagccagaaacctgtcttttcttttgaacctctcttactgctttaatttttcaaattctagacttttttatgatactaatgggaaatatccctaaatccaataccagttggcttccattttctaactgttcaccttcaagctgttctgtacagtgataccaaattgatttttccaaaatgaaaatctcaactggttgctcccaggcttgaagtccaaagtctttcattaatagggtattcaaaaccaatcacaacctggttccacgttaccttaacaactcttatctcctgccatacctccatgtacatacagaccaggtatgccaaaaaactggcgatttcccaaacatacccatgtattttactgcatgtgggcttttgaatttatcctttccaacatctgtgcctggtgtattcttaatgatccaaatgaaactttacgtttcagcagcaagaagtctttccctaatcttccagcagaggaagcactgccacttccaagtttctggtcatttgtaatatatatttatttgctccttagatgattttgtctttcttctttagcagtgttagcatttcaatagtagttgcatactctgtgcatgaaaattgtagtatctgaagtgtttaggaccatctaaatctattgttagttctttgttgctgactttcctttatgttgacttattaccttgtgtgcttggtgattttttgtttcatactgtgataatcttaagcatctaaatgtgggtctccttcctccagagatgatttgccttctcctctatttgcaagccaggaattccttccatctgacatcacgttaacttccatcaaggatcccggcttcatgtgggaatcagaggttcacattctgtaccttggattactaggcttaatagcccaattttaaccttgctgtgggaatttgccacatggagattctaggttttgcttactaagcaccctttgagttctagctcagtgttttgctatcctgttattgttttggtctcttgagtatattccttactgtcttgcaaatccaagaacattttagcaggaatatatgttataatttatctaggatcaggtaatattttactgggtaagtctccagaagaatatacagtctaccatatttgtagaactgtgtttctggactcctagaatatcttaaatttgtgttgttttcactgtctgcgttcattttttagtgaatgtgcctaatttttcctataatattgaaggtcgttcaggtcaggggttgtgatttattaatttttgtatctcattgacttcctagaaatgactgctactcaatacatgaatatttaaagaaagcagatgattttgttgataatggaaactaactctcttgcatagtgaaaggctgaactgtggaagaatacagtggagaatgtgagtccagtgagagacagaggaggaataggaagagcaggaaactgagaggttgcctagagagtgacagagtgaggagagattccaaataaaaattgctctctatcctcttcttcctctatgtccatctactctaccatgtctttaagtaatgtgttgtgtttcctattctaaattctaaagtagatcattagaatgatttatttttctttcaaaacaaactaataataaataatcagatacattaccatttagtagatggaccttagtgtatgttgttgctttctgagtataaatggtccttaggcaggcgaaaatgtatcttcctcacagcactggacacttctcctgagggcatcattgctaaagtgatctgactgaaccagttattgcctaagatttctttctcttctcatactctgtattccgaacagtggttgcagaagcagcttttatttgagctattgcagtgcctctggtgcttaaattcttgcctccaacgtagatgttattgttaatgtttggggtgtttctatctcctgtgacactgttgatattatagaaaaatgcatctgtcgattttgtgtttgtacctcaagaaacagaaccatctgctgctagtatcttttccagtttgaaatttgatggaaatattctcagcccagttggcaaaattgtctgactcctgtctttgtctcttgaatcttgttccccacagtcgaaagaaccctcttggtcttattattgccctagatgaaaacaaagaagcaaaaggagaacttttctgggatgatgggcaaacaaagggtgagcgctgttacaataatgttgctgtttcccaacctgcgcctgtgacttatggtccttcactcctgctggtcattcagctgtgggagaaatctcagcaggcacagtagcaagagtcacttaagtattttgtttctggttgcaccattcagggatagtggtggacgaactactgacgaaagaaaaatgcatttgtatctctgacagttctcccattcgccagtgatacctataatggctcttattttattgtcaatgggtgcttagatgagaaggtttcaagactgttccctaattctatgttaatgtcttcctccgaaaattcttatgagcaaatgttgacgatataaaaatcatgcacctgccagtgaggcagtgagaatatactgttctagtgtgtactcagctagccatacgttttagcatatttgtgggtccagtatactaacaattcttgttcttcaagtttaggaaatagattcctttgaagcatatgccttggaagcccttggaagggaatctttgcaatgttctggtagaaaagagaaggaaaaacaatggcttggccttggagactcttgtccctctaatccaatatgtagattaaaaattaattatttatttggtagtcaaatattttgttggcaaataaagattgaatatatttaaggtggacgatgtgaggatttaatatatgtaggcatagtataatgattaccacagctattttaatgaacacatccatcactaccaatgctgcagactggatccccagaacttattcatctaagaactgaaagtttgtacccttgaccatcatctccccattttccacttctgcaggctctaagaacaactgttgtaggctctgcttctaagagatgaacttttttagattccacatatgagtgagaccacgcagtattggactttctgtctctggcttatttcacttagtataatgtcctcctaagtcattcatgctgttgcgaatggcagaatattcttctttctatgtctgaaaaatattctactgtatatatgtaccagaacatctttatctattcatccactgatagacacttaggttgttttcatatcttggctactgtgaagaaagaaattaaaaattgaaatgtaagggctaaaattgtaaagctcctagaagaaaacatagcaaaaaacctccttgacgtagtcttggcaatgactttttggatatgataccaaaagcaaaggcaaaatgccaaaaagtaaacaggcgtgactacatcaaactaaaaggctcctgcacagcaaaagaaacaatcaacaacatgaaaaggcaaactacagaatggataaaaatgtttgcaaaccatatatctcagaagagattaatatcaaaaaataaggaacatatgcaactcagtagcaaaagatcaaatgacccaattaaaaagtgggtgaaggacctgaacagatgtttttccaaggaagacatacaagtggctaactggtatgtgaaaagatgctcagcatcagtaaatgacacaggtatgcaagtcaaaaatcacagcgagatgtcacctcacacctgttagcatggaaatcataaaaaagaaaggagagaagtgctggtgagggtgtggagaaaatagaattttttagactgttggtgggactgtaaattgttacaaccattatggaaaatagaatggaggttcctcaaaaaattaaaaacagaacttccatacaatcccatgaattcccacttctgggtgtatatccagaggacatgaaaccagtatctttaagagatatactcactcctcccatattcattacagcattacttgcaacagccaagatatggaaacattctaagtatacattgatgaatgaatacaatggaatattattcatccataaggtaaaggaaatactgccatttgtgacatcaggatgtaactgaaaagagtgggagtgtgaaatctgttcttctgtggtgggcaagccggagtctgacttgtctttctgtcactttcagatactgtggccaagaaagtatatcttttatgtgagttttctgtcactcaagtgagtagcatatttttatgaatcttaggtgtgggctttggactgaccattagcacatctgtgcttgtgtatatgtgtgattatatttgtaactttatatgcattattggctataggtgagcacatttctatttatgatttcatcgatgttttcaaaaggaggcattaatatagcaagtagtgtttctaaatatagtttttaattatctgtgtgtttttatgattgtatcaaattagaggattatcaaactaatgttgtacttcttgagcagacactagtagagaaagcagagaggcattcatggcagtggggggtatccagtctggaatagaatatatgagtgacttgagaatctgtgtattacaggcatacctttatgcataattggagttaattgttttgcagaaccacttggaggtgactatttcacaatcaacctacaaggaccccaataatttagcattcaatgagattaaaattcttgggatggaggaacctagcaatgttacggtgaaacacaatggtgtcccaagtcagacttctcctacagtcacttatgattctaacctgaaggtaaaaacccattttgttgagatggtacattgagaattctccatagcaccatgatgtttcttcttgccaagtttgcatgggtccctgaagtaccagggcacctttgatgcatgttttggggaattgagagggcacctttgatgccttttttggggaaaaaaatgaggtggccagagctagaatgagttgggtatttttcttcttattcccttctctgcctatcagtgttcccatctctctagctggtttcacttgcttttcccaaaaatagaataattatgatgagacccaggaacagcaaagttggaaagtggggaatagcctgacattattagactgtgaattttgtatgactagcacaaataagaattggtatttgaaaaaggccagcttggataggaaacttgtggtcaggctttggaggtcttagttaccaacttgaattaattctcaagcagtctcatattgatccttgaatgaaggctgtgctactgtgtgtgagcattgttgggagtgggagtgggggctggggactagtagaacagggaagtacaagatggtttagatttagaggagactgggagaaggatgataatctttagaatgtgattttattactccagacgtgtgagaactttaacttgggaagtgctgtctagagaagcatcaaagataagaaaaatatatggaaaatattaaatatttgaattaataggattcaaggaaggtttcaaatttgcagcctttatgcttagaaaaataaagatgctgggatgttagaagtggaaagaaagatgattttatttccacctctcaattttgctgttgccaaaattgaaattcaaagaaatgaattagaattcccaatttgccctgatgtgattattattcattgtatgcctgaatcaaaatatttcatatactccataaatatgtatacctactatatactcattaaaattaaaaattaaaaaaagaaatcatttgtccaatatactacataaatgcgagcatgataaccaggtcatatgattcttattgctgtgttctttctaccactccacgccaatgggggatgctggtttggggactggagagcaagaggatcagctcactttgagatgacaccatgtgtcatgctaaagaggaagtgcagaagacacccttccagacaagacacagagggctaagaggagttagggtagaaaagaataaggggtgatcgcgacaggttttatttgacctaattgttttcattatgctatgtacaagattctgctagaggggagtcatatgccctgttactgctaaatagattcccccactgtacagttctcttcttataagctaaagtgatatgttgcttggatggttgaaagtctggactgatgtctatttgtttttccaaaataaataaataaataaagtcttagattttgcaaggcctttctcccaaagatgaatttccttgtgatttctgcattcctacaggtcgccattatcacagacatcaatcttttcctgggagaagcatacacagtggagtggagcataaagataagggatgaagaaaaaatagactgttaccctgatgagaatggtgattctgcagaaaactgcactgcccgtggctgtatctgggag

SEQ ID NO: 1209 - DNA, 354 bp, Homo sapiens
  full length sequence of bloodCirc_00276
caaaatcttaaaaatttgaaaagtcttgacctgtttaactgtgagatcacaaacctggaagattatagagaaagtatttttgaactactgcagcaaatcacatacttagatggatttgatcaggaggataatgaagcgccggactctgaagaggaggatgatgaggatggcgatgaagatgatgaagaggaagaggaaaatgaagctggtccaccggaaggatatgaggaagaggaggaggaagaggaagaggaggatgaggatgaggatgaagatgaagatgaagcaggttcagagttgggagagggagaagaggaagtgggcctctcatacttaatgaaagaagaaattcag

SEQ ID NO: 1210 - DNA, 1143 bp, Homo sapiens
  full length sequence of bloodCirc_08220
atatcagaaaaccaggactctgcagatgttgatcctcaggagcattcatttactcgaactattgatgaagaagctgaaatggaagaacaggctgagagagaccgggaagaggggcatccggagccagaggatgaagaggaggaacgggaacatgaagtgatgacagctggcaaaatctttcagtgtttcctctcagcccgtgaagtagctcgtagccgagaccgagatagaatgaacagtggggcagggtctggggctcgagctgatgatccacctcctcagtctcagcaagagcgaagggtcagcacagaccttcctgagggtcaggatgtgtacactgctgcatgcaactccgtgatccatcggtgtgccctgttaatattaggagtaagtcctgtgatagatgagcttcagaagcgaagagaagaaggacagttgcagcaaccttcaacaagtgcctctgaagggggtggacttatgaccaggagtgaaagtcttactgcagagagccggctagtccacacaagcccaaattatagactgatcaaatcgaggagtgaatctgatttgtctcagcctgaatcagatgaagagggttacgcactgagtggcagacgaaatgttgatttggatttggcagcatctcacagaaagagaggtcctatgcacagtcaattggaatccctgagtgactcttgggctcgcctgaaacatagcagagactggttatgcaactcctcctattcctttgagtcagattttgatcttaccaagtctttgggagttcacactttgattgaaaatgttgtaagctttgtgagtggagatgtggggaatgccccaggttttaaagagccagaggaaagtatgtctacaagtccccaggcctccatcattgcaatggaacagcagcagttaagggcagaacttcgtttagaggcacttcatcagatcctcgttctattgtctgggatggaagaaaaaggtagcatctcactggcaggaagcagattgagttcaggcttccagtcctccacactactcacgtctgtgaggctgcagttcctagcagggtgttttggtttaggcactgttggacacacaggaggcaagggagagagtggccgattgcatcactatcag

SEQ ID NO: 1211 - DNA, 327 bp, Homo sapiens
  full length sequence of bloodCirc_10863
ggagagtcccgtattctcagagtaaaagttgtttctggaattgatctcgccaaaaaggacatctttggagccagcttctgctccattgctgttgaacttttttttggtcgtgacatcagaaaaataaccaagtgtgagtctgataatagcaatgatccgtatgtgaaactttcattgtacgtagcggatgagaatagagaacttgctttggtccagacaaaaacaattaaaaagacactgaacccaaaatggaatgaagaattttatttcagggtaaacccatctaatcacagactcctatttgaagtatttgacgaaaatagactg

SEQ ID NO: 1212 - DNA, 6403 bp, Homo sapiens
  full length sequence of bloodCirc_13077
atacaaggtctcgctgttctacctaggctgttctagaactcctaatgtcaagctatcctcctgcctcggcctcccatgctgttgggattacaggtgagaaccaccgtccttggtcacaaattcctttaaagagctgtgcaatggctctcacagccattgcagtacactgaactccatagagacagcactgggcaagtgagaaccagacaggcattgggcgactctgcctcactgaggaaaaataactaaaaatgggcaaaggagatcctaagaagctgagaggcaaaatgtcatcatatgcattttttgtgcaaacttgtcaggaagagcataagaagcagcagccagatgcttcagtcaacttctcagagtttttaagaagtgctcagagaggtggaagaccatgtctgctaaagagaaaagtgaagacatggcaaaggtagagaaggcccattatgaaagagaaatgaaaatctatatccctcctaaacgggtgacaaaaaagaagtttgaggatcccagtgcacccaagaggactcctttgggctttttttctgttctgttctgagaattgcccaaaaataaaaggagatcatcttggcctgtccattggtgatgttgtgaagaaactaggagagatgtggaatgacactgctgcaggtgacaagcagccttatgaaaagaaggctgcgaagttgaaggaaaaatatgaaaggatattgctgcatattgagctaaaggaaagcctgatgcagcaaaaaaaggaatcatcaaggctgaaaaaagcaagaaaaagaaggaagagtgccaggctcagtggctcacacctgtaatcccggcactttgggaggccgaggcaggaaaatcacctgaggtcaggagtttgagaccagcctggccaacatggcaaaaccctgcctttactaaaaaaatacaaaaattagctgggcgtggtaatgcattcctgtaatcccagctactcgggaagctgaggcatgagaatcacttgaatccaggaggcagaggttgcaatgagccaagatcgcaccattgcactggagcctgggcgacagagcaagactctgtctcaataaataaataaataaataaataaataaataaatagagggaagaggaggaagatgaagaggatgaggagaaggaggaggatgaagatgaagaagatgatgatgctgaataagtttgttttagtgcagttttttttcttatctataaagcatttaagccccttgtacacaactcattcctttcaaagaaaaacaattgaaatgtaagtctgtgtaagatttatttttaaactataccgtgtcattttttgtatggtaaacacactactgaacatgtctttagataaccctgtcctggtggcattttcaatagccactattgaaaatgtggctaaaactgtactttgtctggtacagtatgggggttgtaaattggcatggaaatttaaagcaggttctccttggcgcacagcacaaattatatataagttatatatgggaattgtaatttttcatcttcagttgtctctgttgcagcttataagaaacaattgctctgttaacgtaatattacactgtaattgcaaaaaaaagtcgcagctgttctgttgacagtctgaatgcttttaagtaaatacaattttaaaaatgagtattgtccttaaacaaaaaaaaagagctgtgcaatactctatctgccaccagaggacttcacttacatctgtgccaccttcaagaaaggcaatagatttctgaggtttccaattgaaaatggctggaagggctctgttagaaaaatcagtcattgggaagttgatggaagtaggtggcccatgaggacaagatacactctagtgaacaggaaagaaagcaactaactggggaggtctgattgtatggagtgctttccccagagggagaatgtgccagttatcaatttattgcctctcagctcccttcactgactcatctattaaaacatatctgggccctgtaattagtttttacttttactagctggcacaatgtttcatcagtagagggtgctggagagaggcattgaagaaaaaaggtgttttcctccctggtcctgatggcttgttggctggacccctgaagagcatgtttttaacttcactgttggctcagtataagtgcctacagggcattgcttttgctgtgtgccttcttcagctcttttcttgactggcagagtgcggttaggagacccggacagcatggctttcaccctgtcctatattgctgctctgcataggcatgctgggggccccatagggctggctgtctagtgaactgaatgcccagccttcatccactagctcagactactctagcccaagtcatatgcagaggtgcactcggttgctgtggaaggcctccccagctctcagtcccaccagcaccctcagtggcagcccaactcactctgcacacccacccatcaagttcagctttcctgggtcctagatatcctgacacagacactgtgtgttccaggcctcacacctacagtggctctgtgactctctctgtaccagtccccctgtgtacacccagcttgcccaccggctctgacttgcctgccccaaagggttacttctttcctggcaactcttagccatctctgggctgtgcaacttaggaactcctctgccaccaagtagattgtgaccacaccttcttcaatgagctctgatcccttcctccaagtttgtccttttttggaactttccctcagtcctacagcagtgtttagagctttcattctatctttagagtcactctcctatctttctttactcagtaattctttatattaaacatccctgtttaaattactatgtggtttttgctcttgattagaccctaactaattaaagtttactctcactgggagagggcaacaggtgttctggtctttcattaaatctcatttcaagaaagggaagaaagcaatttcctgtcaagaaacttgatgttgatactggcacagactctctgggtagaggatggaattggtataaaaaccctaaccagtaactcaggccctaggcccagatcctggcttatattcaagtacagtttcgagatagggattttcctgtacaatgaaagaacagcttctgagtgcctatcataacccagagctggtaagggtttaagacgtttgctagacttctgcctacaatggaataagataacttattctgggaacattattagttacagtgagatgtaaaattcaccttcttttcattgaggtggcacttaaaaatagcataagagacagatagtttctagattaggtataatgtgctaataatgtaaaaaaggttcttcttttgcttctttctctttcttgccaacgatgcatttctaagtttctcttttaaagaaaatttcctgggtctgaaaaggaagttcgaagtccttgtgatattctgctgacagattgatcttgttttgattttcttgaatgttctgttctcctcttctgcaaacaatgggtcatttttgtctctcgattttacttagctgtggtttgaagtcttcttaacataacagtactgtgtgttaaccatgctataattaaagagtgaagctgaggttctccagtgctccttaaagatttcctgggttaactctaccacaactatacatctctgataatgatatctgcagtcttgttcataaaataagatgcattaccaaggtgagatgattgcccacaatcatatatctaaagaaggaacatataactcatctgaatacaagagacttccttctaaaggatttgacatatctcccattgttttcccatgtttgtcctcatagaaatctaatgaggtagatattactttagagataagaaagccaggctaaataaattagggagatttctccaagaagtttcagtagtagtgtgcagactagaagttgtattttaattctctggctttacgtaaatatttacttactaacttttcctcatataaaaaagagctggctatgcaacaactggtttttctttttctttttttctttttttagacagagtctcgctctgtcaaccgggctagagtgcagtggtgtgatcttagctcactgcaccctccacctcccgggttcaagcaattctcctgcctcagcctcccaagtagctgggactacaggtgtgcaccaccacacctagctaatttttgtatttttagtagagatggggtttcaccatgttggccaagctggtctagaactcctgacctcagagatccacctgccttggccacccaaagtgctgggattacaggcacccagcctggtttttcttaaatgagataatttcttccttttttcctaaatcatgtgtcaggaataataaaattattatttatagtaattccattactcacagtaataattgtgataataatgtaaacaatttgtatttatatagcattctattattcacaaagcattttgacatatattgtccaatttcattcctacaaaaatccttgtgaggtagatagaaaaagtattattttcctattttacaaatagaaaatagaggctcagagaagttaatcgaatttcttaatagcatatatttaggacgtgatggtggagattgaatttcatcctaaatctaactctaaaacctgtcctatgacaccctccatatactacataatagccaaagacatattaagcctatctgctgttcaacaaattacatgcacccagaggtccaatttggcagagagaacaatgcatctaagtgttcagttatgaattgaattctgaagttagagaaatatttgacacatattgaaattgtgtattctgtaacatgtgttgtgataaacacagagtctaataatgtgtagtactgtcagatatagtacctccatagacatactgtaatatagtagtactgtcagatatagtacccccataggcatactgtaaatagatttctttcactccatggaaacctaagctcagagaagttaaataaattatttgcaccaggctcctatgatttcaaaatgctgctttttctggattaatgtagttaatttcaaaaaagatgtccatatagaaaaggttctccagggagtagagaaaaagagctggttgtcttccaccagcttgaggaggattcatgagtggaaccaggcactggtggaactaatcagggtgtcacccaagcaggacaccctaagtttatctgcttatctactgaactgataggcagcaaagaagatatcaccattcacggcctggtgacatgggcagtttctgacatatttgcccatcgtccaggatacaattcaaataaaatcatatgttctttccacaggttgtcaacatcccttgactgatttaggtttgatcatatccattggcaagggcacatgctcactgagtttaacagaagcataataccctgtactgcttttatttccatttcttttttaaagatatttttgctcagaatgtgcagttgaattctagatggtaaaataagtatcaaatggaacctctttgtattctttaaatgaatgatatctttctttgcatttataatgatgtatattttcaatcatgacacattctggattttctaagatagttctgttttcaaattatttatttttcccatggaagggcttatcttggtccagattttttattcagaaaatagtaactatattgcatgttgtgtatgtcatctgtattttatttgccatttgtcacctgtactttaatagctttctactatattacctgttgattcctatattaagaatataatgaattttctgtaaatctaaaatcagaaaaaaatacttttaaaaagaacttaaaggaacttaattatttgtgtaagacaaatgctttttatttcatttattcattatatatgtttaatatatctaactgatatgacaaatagtttatcaatatcttgctcacaccaaaacattaattccatttgcaaaactatgtgaaaattatagctattatcccaataattcagataaaatagctttctagtgtgttttccctttcaatatttgggttgatagggaagggatatgaattttgacttgaaccataaattagattgtctagattgactgatttcatgacataactatgcaacctgcccttggggtttcttggtgatgaactttttcttactgttctcacatattttgtttccagctataaattcatacaattatcagagtttggttttggtcaagtcataattgtgagtgaagaaccatggaaggagaacatttcttgctcatcaactactttcataaaatcaacaatttgcttaa

SEQ ID NO: 1213 - DNA, 322 bp, Homo sapiens
  full length sequence of bloodCirc_04820
acttaattcagtgcacaaatgagatgaatgtgaacatcccacagttggcagacagtttatttgaaagaactactaatagtagttgggtggtggtcttcaaatctctcattacaactcatcatttgatggtgtatggaaatgagcgttttattcagtatttggcttcaagaaacacgttgtttaacttaagcaattttttggataaaagtggattgcaaggatatgacatgtctacatttattaggcggtatagtagatatttaaatgagaaagcagtttcatacagacaagttgcatttgatttcacaaaagtgaagagagg

SEQ ID NO: 1214 - DNA, 536 bp, Homo sapiens
  full length sequence of bloodCirc_17594
ctctctatcaatatcagctcacatcattgaaaagataattttgaagacatgttttgctgaaaagacactaagaaaaattttacgaatgggatgaacatgctccagttaattgactacctactgcaatttgaatgttaacattacccatctggtacagttacctagtgatgtacctattttcacaataccctgtttcagtgtgcttgtcttgattaaagaattcaaagtggagtaccgcaaacttgatatggaaaataaaaagaaagacaaggacaaatcagatgatagaatggcacgacctagtggtcgatcgggacacaacactcgaggaactgggtcttcatcgtctggagttttaatggttggacctaactttagagttggaaaaaaaattggatgtggcaattttggagaattacgattagggaaaaatttatacacaaatgaatatgtggcaattaagttggagcccatgaaatcaagagcaccacagctacatttggaatacagattctataagcagttaggatctggag

SEQ ID NO: 1215 - DNA, 243 bp, Homo sapiens
  full length sequence of bloodCirc_07062
gttgtggcagcactgcctgaaggtatgagaccagattctaatctttatggttttccatgggaattggtgatatgtgcagctgttgttggattttttgctgttctcttttttttgtggagaagttttagatcggttaggagtcggctttatgtgggacgagagaaaaagcttgctctaatgctttctggactaattgaagaaaaaagtaaactacttgaaaaatttagccttgttcaaaaagag

SEQ ID NO: 1216 - DNA, 190 bp, Homo sapiens
  full length sequence of bloodCirc_16701
ttgtctgagggaagtcaaaagcatgcaagcctacagaaaagcattgagaaagctaaaattggccgatgtgaaacggaagagcgaaccaggctagcaaaagagctttcttcacttcgagaccaaagggaacagctaaaggcagaagtagaaaaatacaaagactgtgatccgcaagttgtggaagaaatac

SEQ ID NO: 1217 - DNA, 168 bp, Homo sapiens
  full length sequence of bloodCirc_08004
aataacaatacttctgaaaacactttgaaacgagtgagttctcttgctggatttactgactgtcacagaacttccattcctgttcattcaaaacaagcagaaaaaatcagtagaaggccatctaccgaagacactcatgaagtagattccaaagcagctttaataccg

SEQ ID NO: 1218 - DNA, 1227 bp, Homo sapiens
  full length sequence of bloodCirc_16681
gattacttccttaggatagattgccagaagtggagttactgggtcagagggtatgaacttatgaactttttttttaaataaattttttgttcattttctgtccagtcatttgtaaaaaaattaaaataataatgattataattgttacctgctagaaaactgtgtctgaaggcaagattctgtgatcagaaaagtttgggaaatacccagggtaaaaagccttttaatctgatttacctcagcatttcccaaattaactgaacactgaaaattttttttgatacacttcttaaaattttgtggaagttttatataggatatagtctatgaactactgatgtaaaattaaaattgttttatttgcttgaaatattatgttttattggtcaaaggaattaaactataaatcttcatgctaaaaattattaaaagggattagtgttgtttactatggtttttgtgcatgtctttataaagtcttataacttttaaaattgaaatgttctatattgtttactaaagaacattttaatgccttggtggcatcaatacttttttgcaatcattaatgatatttagaaagtagacatataacatgaaagtagaacataatatagattgtacaaatcttgttttttaccctattttcccctgcagaatgtgaaaacctttgcatcttctgatagtctagccaaggtccaagaagtagcaagctggcttttggaaatgaatcaggaactgctctctgtgggcagcaaaagacgacgaactggaggctctctgagaggtaacccttcctcaagccaggtagatgaagaacagatgaatcgtgtggtagaggaggaacagcaacagcaactcagacaacaagaggaggagcacactgcaaggaatggtgaagttgttggagtagaacctagacctggaggccaaaatgattcccagcaaggacagttggaagaaaacaataatagatttatttcggtagatgaggactcctcaggaaaccaagaagaacaagaggaagatgaagaacatgctggtgaacaagatgaggaggatgaggaggaggaggagatggaccaggagagtgacgattttgatcagtctgatgatagtagcagagaagatgaacatacacatactaacagtgtcacgaactccagtagtattgtggacctgcccgttcaccaactctcctccccattctatacaaaaacaacaaaa

SEQ ID NO: 1219 - DNA, 577 bp, Homo sapiens
  full length sequence of bloodCirc_17907
ctataaagcgttaacagccagtgagatagaagatcttaagctggagaactcatcattacaggaaaaagcggccaaggctgggaaaaatgcagaggatgttcagcatcagattttggcaactgagagctcaaatcaagaatatgtaaggatgcttctagatctgcagaccaagtcagcactaaaggaaacagaaattaaagaaatcacagtttcttttcttcaaaaaataactgatttgcagaaccaactcaagcaacaggaggaagactttagaaaacagctggaagatgaagaaggaagaaaagctgaaaaagaaaatacaacagcagaattaactgaagaaattaacaagtggcgtctcctctatgaagaactatataataaaacaaaaccttttcagctacaactagatgcttttgaagtagaaaaacaggcattgttgaatgaacatggtgcagctcaggaacagctaaataaaataagagattcatatgctaaattattgggtcatcagaatttgaaacaaaaaatcaagcatgttgtgaagttgaaagatgaaaatagccaactcaaatcg

SEQ ID NO: 1220 - DNA, 304 bp, Homo sapiens
  full length sequence of bloodCirc_05911
ttccgatgaagttaaattccgtcaagatttaatgaatattgcgggcacaacattatcctcaaaacttcttactcatcacaaagaccactttacaaagttagctgtagaagcagttctcagactgaaaggctctggcaacctggaggcaattcatattatcaagaagctaggaggaagtttggcagattcctatttagatgaaggcttcctgttggataaaaaaattggagtaaatcaaccaaaacgaattgaaaatgctaaaattcttattgcaaatactggtatggatacagacaaaataaag

SEQ ID NO: 1221 - DNA, 397 bp, Homo sapiens
  full length sequence of bloodCirc_00169
ttggtgtaatacggtgcccagtatgccgccaagaatgcagacagatagaccttgtggataattattttgtgaaagacacatctgaagctcctagcagttctgatgaaaaatcagaacaggtatgtactagttgtgaagacaatgcaagtgcagttggcttttgtgtagaatgtggagagtggctatgtaagacatgtatcgaagcacatcaaagagtaaaatttactaaagatcacttgatcaggaagaaagaagatgtctcagagtctgttggagcatctggtcaacgccctgttttctgccctgtacacaaacaagaacagttgaaacttttctgtgaaacatgtgatagattgacatgtagagactgtcagctattggaacacaaagaacatag

SEQ ID NO: 1222 - DNA, 213 bp, Homo sapiens
  full length sequence of bloodCirc_14223
caacaaggaaaaattcaggatcagacaaccggaaatgatccctcggattaatgctgaactgttgtttcggccaactgctctttcaactccaagcttttcttctcctaaggaaagtgttccaagaagacatctttcagaaggaacaaattcttatgcgacaagacttctaaataatcatcaagttccacctcagtctgaacctgagagcaacag

SEQ ID NO: 1223 - DNA, 777 bp, Homo sapiens
  full length sequence of bloodCirc_22527
gatagaatttttgcggcatttgaagagctttttccagattatgtttaaaattgaaaccaagccatgtggtgaagaactcaagggtggggataaagtgctgatgacctgtgttggcattggtttctccaaccttagcaagaccctcaagtgataaccatcacaagataaggccccaatgcctacagacaaagcagaagctgccacggacaccaatgggaccaagtccaaatggattaatccaggacagaatagccacttgcttaattttctgtgaagaaatatcaatatacaaataaaagacatccctgtagcatatggtttccagctgtttctccagtggcattgccattgcccaggaggggcccagtcaccatgagagctcccttgccttacctggaggaagaatgtgccttcaggccacagtcgtgctgctagaacagtctcgtagctgcagttcagctgtgcttcctcagcctactatcataggcttcctcagccctctgtcatatggctgttttgcaaacctgtggagtctgttactgttctttctgcaaggactcacctccttgagccttggtttttgttgtagggattaaatgagataatatgagtggcagctcttcatgagtcctgcagtgctaagcaaatgtcagaaattggtgtattagactatttatctttgatcttctgaatggattgctgtcatggacacggacacggatcttcatctggttcattgtatttatatgtgagggatggatggctgcggggctccaa

SEQ ID NO: 1224 - DNA, 129 bp, Homo sapiens
  full length sequence of bloodCirc_09138
agtttatgtggccgaggcagacaagtggaattaggccttgctgcaggggacttcatttccttctcagtactggacccatttatgaggaggtggcttatgaaagtgtgatgttcgcgtatttcttgacag

SEQ ID NO: 1225 - DNA, 378 bp, Homo sapiens
  full length sequence of bloodCirc_18377
aataattgtgtgcccaagaagatgctgcagctggttggtgtcactgccatgtttattgcaagcaaatatgaagaaatgtaccctccagaaattggtgactttgcttttgtgactgacaacacttatactaagcaccaaatcagacagatggaaatgaagattctaagagctttaaactttggtctgggtcggcctctacctttgcacttccttcggagagcatctaagattggagaggttgatgtcgagcaacatactttggccaaatacctgatggaactaactatgttggactatgacatggtgcactttcctccttctcaaattgcagcaggagctttttgcttagcactgaaaattctggataatggtgaatgg

SEQ ID NO: 1226 - DNA, 299 bp, Homo sapiens
  full length sequence of bloodCirc_18506
gatattcgaaatcaaagaatctatcgtaagcttcgaaaagctgaattggcaaaacttcagcagaccctgaatgcacttaacaagaaggcagcattttatgaagagcaaatcaattattatgacacctacataaagacttgtttagacaacttaaaaagaaaaaatactcggagatcaattaaactagatggaaaaggagaacccaaaggggcgaagagagcgaagccagtgaagtacactgcagcaaagctgcatgagaaaggtgtcctgctagatatagatgatcttcaaacaaacca

SEQ ID NO: 1227 - DNA, 783 bp, Homo sapiens
  full length sequence of bloodCirc_10787
gttcgatacaagaggctgttttcctagcgtggcttgctgcctttggtaagaacatgtcgtccatcttgccattcacgccgccagttgtgaagagactgctgggatggaagaagtcagctggtgggtctggaggagcaggcggaggagagcagaatgggcaggaagaaaagtggtgtgagaaagcagtgaaaagtctggtgaagaagctaaagaaaacaggacgattagatgagcttgagaaagccatcaccactcaaaactgtaatactaaatgtgttaccataccaagcacttgctctgaaatttggggactgagtacaccaaatacgatagatcagtgggatacaacaggcctttacagcttctctgaacaaaccaggtctcttgatggtcgtctccaggtatcccatcgaaaaggattgccacatgttatatattgccgattatggcgctggcctgatcttcacagtcatcatgaactcaaggcaattgaaaactgcgaatatgcttttaatcttaaaaaggatgaagtatgtgtaaacccttaccactatcagagagttgagacaccagttttgcctccagtattagtgccccgacacaccgagatcctaacagaacttccgcctctggatgactatactcactccattccagaaaacactaacttcccagcaggaattgagccacagagtaattatattccagaaacgccacctcctggatatatcagtgaagatggagaaacaagtgaccaacagttgaatcaaagtatggacacag

SEQ ID NO: 1228 - DNA, 144 bp, Homo sapiens
  full length sequence of bloodCirc_04075
gcagaagatgatgaaacacccgtggatttaaacaaacacctgtatcaaatagaaaaaccttgcaaagaagccatgacgagacaccctgttgaagaactcttagattcttatcacaaccaagtagaactggctcttcaaattgaa

SEQ ID NO: 1229 - DNA, 363 bp, Homo sapiens
  full length sequence of bloodCirc_19214
gcaccagttagaagacaaatgaaagctaagcaactcagtgcacaatcttacggtgtgaccagttcaacagctcggcgaatattgcagtctttagagaagatgtcaagccctttagcggatgcaaaaagaattccatccattgtttcttctcctctgaattctcctcttgataggagtgggatagatatcacagattttcaggccaaaagagaaaaggtggattctcaatatcctcctgttcagagacttatgaccccaaagccagtttccatagcaacaaatcgaagtgtttattttaaaccatctctgactccttctggtgaattcaggaagactaatcaaagaatagataacaagtgcagt

SEQ ID NO: 1230 - DNA, 304 bp, Homo sapiens
  full length sequence of bloodCirc_19533
gcagaagctgaggaagattgtcattctgatactgtcagagcagatgatgatgaagaaaatgaaagtcctgctgaaacagatctgcaggcacaactccagatgttccgagctcagtggatgtttgaacttgctccaggtgtaagctctagcaatttagaaaatcgaccttgcagagcagcaagaggctctctccagaaaacatcggcagataccaaaggaaaacaagaacaggcaaaagaagaaaaggctcgagaactcttcctaaaagcagtagaagaagaacaaaatggagctctctatgaag

SEQ ID NO: 1231 - DNA, 240 bp, Homo sapiens
  full length sequence of bloodCirc_10179
tggaggaatcagacatcattgatcttgagaaacgctattggttattgaaggctcaatcccggactggacgatttgatttagagacatttggcccattggtttcaccacctattcgtccatctctaagtgaaggtttgtttaatgcttttgatgaaaatcgtgacaatcacatagattttaaggagatatcctgtgggttatcagcctgttgcaggggacccctggctgaaagacaaaaat

SEQ ID NO: 1232 - DNA, 177 bp, Homo sapiens
  full length sequence of bloodCirc_09309
acctttgaaactcacaactctacgacacctctacaggaaagaagccttggactagatataaatatggattcaaggatcattcatgaaaacatagtagaaaaagagagagtccaacgaataactcaagaaacatttggagattatcctcaaccacaactagaatttgcacaatataag

SEQ ID NO: 1233 - DNA, 336 bp, Homo sapiens
  full length sequence of bloodCirc_16985
acgagcaaaaatcaaattaaagtagatcttgtagatgagaattttacagaattaagaggagaaatagcaggacctccagacacaccatatgaaggaggaagataccaactagagataaaaataccagaaacatacccatttaatccccctaaggtccggtttatcactaaaatatggcatcctaatattagttccgtcacaggggctatttgtttggatatcctgaaagatcaatgggcagctgcaatgactctccgcacggtattattgtcattgcaagcactattggcagctgcagagccagatgatccacaggatgctgtagtagcaaatcag

SEQ ID NO: 1234 - DNA, 260 bp, Homo sapiens
  full length sequence of bloodCirc_06320
ttccaggaatggatggaggtgctttaactgatacaagtctcacagattcctattttagcaccagctttattggagtcaatggatttggaagccctgtagaaacaaaatatcccctgatgcagagaatgactaatagtagcagctccccaagccttctaaatgacagtgccaagccatattcagcccatgatcctctaacatcacctgcttcatccttgtttaatgactttggtgccctcaacatctctcagagacgaaag

SEQ ID NO: 1235 - DNA, 147 bp, Homo sapiens
  full length sequence of bloodCirc_15439
ggatttatcaaagatgttcatgaagactcccttacagttgtttttgaaaataattggcaaccagaacgccaggttccatttaatgaagttagattaccaccaccacctgatataaaaaaagaaattagtgaaggagatgaagtagag

SEQ ID NO: 1236 - DNA, 297 bp, Homo sapiens
  full length sequence of bloodCirc_18715
aacgtggaatcttgtagaaggaagatcagcattcataaaaaatataaaacaaaatgctcacatagtagaatggtccccaagaggagagcagtatgtagttatcatacagaataaaatagacatctatcagcttgacactgcatccattagtggcaccatcacaaatgaaaagagaatttcctctgttaaatttctttcagagtctgtccttgcagtggctggagatgaagaagttataaggttttttgactgtgattcactagtgtgcctctgcgaatttaaagctcatgaaaacag

SEQ ID NO: 1237 - DNA, 21419 bp, Homo sapiens
  full length sequence of bloodCirc_20193
gtctggcctgattttcctgatgttgttgtgaatgggtctctagactgggacagccaagtggagctatatcgagcttatgtggccttcccagactttttccgtaattcaactgccaagtggtggaagagggaaatagaagaactatacaacaatccacagaatccagagaggagcttgaagtttgatggcatgtggattgatatgaatgaaccatcaagcttcgtgaatggggcagtttctccaggctgcagggacgcctctctgaaccaccctccctacatgccacatttggagtccagggacaggggcctgagcagcaagaccctttgtatggagagtcagcagatcctcccagacggctccctggtgcagcactacaacgtgcacaacctgtatgggtggtcccagaccagacccacatacgaagccgtgcaggaggtgacgggacagcgaggggtcgtcatcacccgctccacatttccctcttctggccgctgggcaggacattggctgggagacaacacggccgcatgggatcagctgaagaagtctatcattggtgcgtgggtccttccccagggcctttgccgacagggcagggagttgggatccttagggaagaggtgaggaggcagatcatgagagcctggtgtgacacagctgtgcttctcgttgcaggcatgatggagttcagcctctttggcatatcctatgtgagtgtccttgggatcctcctaagcaccaagaaggtggggacatctttcagaaatcatcagcaggctccttttatttcctcttgtttcagacgggagcagatatctgtgggttctttcaagacgctgagtacgagatgtgtgttcgctggatgcagctgggggccttttaccccttctcaagaaaccacaataccattgggaccagggtaggacagtggcttctacctccactgttttatgtcacttgaaagacagtctccatttctgtgctaaaagtaatgcagtctctatttcctgggatatctttaaaaaaaggtgtttttttttgttttgttttgttttgtttttttttttgaaacagggatttactctgttggccaggctgaatcgtgcagtgtcccaatcatggctgactgcagcctccacctctggggctaaagcgattgtcccacgtcagccttctgaatagctgggataaaggcacatcccagcgtggctacctaatttttgattttttgtagaaatgggatcttgccatatttcacaggatggtctcgaactcctgggctcaagcgatccactcgacagcctccaaaagtgctgggattacaggcgtgagccactgcacccttaaaaattgtgaagacctggtgtctcaatgaaccatattcctcattgtgctttagattattatttttttcctgtatttcaggcagaattttaccaaatgttccaaaaagaatgtcttacagtgaaattttatcagctgtcttaggagagctttggtgactctttccggtctattaagaatattctctgggcctcatgtatagttttcttttgtttagctgtgagtgatcttcaattggagtatgcttttagtgaccttcttaaatcccctagaaattccagggcgagctcccaacactgttctctttctcctttagagacaagaccctgtgtcctgggatgctgcttttgtgaatatttccagaaatgtcctgcagaccagatacaccctgttgccatatctgtataccttgatgcaaaaggcccacacggagggcgtcactgttgtgcggcctctgctccatgagtgagtgtccagcagggatcccgatgactaatggatgacttattgcattctatgtggtagcagttgatatacacaacgcttccaaattaaagacatgatggccttttgacatgagctcttcagacacaaagtatacctgattactgtctttagcacagtgttatacataccgtaggtcataaaaaaagggtatttattgaatgacgaaaattgaaatgatgcagtacagcatagaatagtttcattctaatttggttgtgcaaaggcctatcttatgtagcagttttgttatatggacccaggtcacaaaagaaggatttcagcaagagaattgagggacgagggccatcctcacatttaaaatgtgccatggttaagaaatgaggtaatattttacaggagagaacacatctacatcccagcatttctgaagtttgaggcacatcccatggggaaagcagaggctgggtgctcctgatgaagctaggcctaggaacaaagcaaggatggctcaggggcagctgtatttccgacttggatctgaacttgaggagcttcttcagagtgtcgggctggggctctgttgggctctgttgggcaccttcatttccctttccaggtttgtgtcagaccaggtgacatgggacatagacagtcagttcctgctgggcccagccttcctggtcagccctgtcctggagcgcgtgagtatggaggcctccgatgaggggaggatcccagctgtgaggcttggggaaaaggacgaggagaagaggcctgagctggtgggggtcctgagacatggtttcttattctacctgtgtctcttcctctctttctgagctgaagtccatcacttaggtgttcttggcactcagctccttcatctttaaaatgagcctaacaattctggttcgtaggatgatcaagaagaaaacacctcatggaatagtcaatgacacaatcatttcttcgttaactaaaataattaatagaaggtcagatgggggcagtattgtaaaaaatttataacagtcctctagcactattacaacttttcagaaggatgacttggcaatgtgtgtacttgtattgctgctggctaacccttcccttcctctacaggagctcctcccagcagtaaaagccatttctttacttctgttgttgattaggcttctgattaaaatatcaattaattgtacctccctcaaatatatatatatatatatatatatatataaatatatatatatatatatatatttttttttttttttttttgagacagagtctcactctgttgcccaggctggagtgcagtggcatgatcttggctcattcaacctctgcctcctgggttctagtgattctcttgccttagcctcttgagtagctgagactacaggcatgtgccaccattcccggctaatttttttttctttttttgtatgtttagtagagatggggtttcactgtattagccaggatggtctcaatatcctgacctcatgatctgcctgacttggactcccaaagagctgggattacaggcatgagccatcgcgcccggccccaaaatctcattatacccacaaaattttcttctgccccagacacaacctcccttgtttgtctctttaagagtcaaaggggtaagtctatgtctataagcaaacagtgatttattttttcccgaagtcctggatatcaaagtgctttatgaaagccacttgttttgggtagacaaatctctggtttaaaaaagaaaacaggaagaaggttgccccagttgttaacctcttgggacatgaggcagctgggtccaaagccatcacaattatttcacctctttcctaagcagtttggttactctgtcctggaaaatggtggcactgcctcaccttgtttgtgtttcattttagaatgccagaaatgtcactgcatatttccctagagcccgttggtacgattactacacggtaagtttttctgaatgtttatataacacgggaatgtggtagagagtacaaaggctttaggtccgatagaccttaggtcaaatgctggctctgtaacccacctgctgtgtggtcttagagaagccactttaacccttgtaatctcagttttctcacctccaagtggggtaagaccactttcctcatagaaccattgtgaaataacacataaagcatctcactcagggtctgtttttttgtgggtgttctctttgtgttagtttttaatatttctttatatcactgctatttacaatgttgtgtaaaggcagatgctagccaacatctgagattgtgttgcaaactatagtttttgtttttattgttgatatctttgcctgctgtaagtttgtaagcatagaggccgttttgtctcttttgattaaatacctccttccatagcatagatgctcaaagaggggcgctgcacataattacataaggcacacaagtgattaggcaatgtgcaaaacacacacagaggtatgggacccaacccttgtgtgtctaagtagtgcaagtgcatttagaaatgaggaagcaatgaagagctccttgccgcatagtttcattgctagtatgattcccaaagactcagctgggaagccagggtcttcccgggcagctctggggtggtgggctcttgctgggaccctgacaaatcagaccctgattcttggggaagaatcaaaggaggtatttccttcgtttctaactaggcctcttcttctgactttctgaggagaacatagttgagggctggaaatacaacaaaggggtacaagcagggatacaggaagcagagcatgtgctggcccctttcatccaaggagatttcagtgagattaagtgaaaagtggagaaggatgtgcaattttgttccttctcttctcagtccattggagcccaagtcctctccacagccccagactcctcttcctgctgctagtctggatctgcccttagggtggtaacatgttaaggctctgctatgtgtgtcccagccaggcgtttcccaggaagaggtggccagctttctttacgtgagactggcctttgtcctgagtgtgcatgttgagtctcccattcactaccagaagatatctttgatggaagagggaaagacaaaagaagtcatggagcaagctgtttagaaaaagatgaaattgggccaggtgtggtggctcacacctgtaatcccaggactttgggaggccgagatggacagatcacaaggtcaggagatcgagaccatcctagctaacacggtgaaaccccatctctatgaaaaataaaaacaattagccgggtgtaggggcatgcacctgtagtcccagctactcgggaggctgaggcatgacaattgtttgaacctgggaggcggaggttgcagtgagctgagattgtgccactgcactccagcctgggtgacggaaccagactttgtctcaagaaaaaaaaaaaaaagaaagagatgaaatttttaatgtttaattaaaatgaagatgaatctcataattaggattaatgaagaagtgtcaccttaattaatcttcccaagtttgggtaactattactcattctagagcacaagctggcaaactatggcccacagccaaatctggttgttagctgatttgcaaataaagttttagtggaacacagccatgcatatttgtttgcttgttgtcaacaataactgcttcttacctgtaaagtagcagctctgaaatgagaggattttgcctaccaggggacatttggcaatgcctggagatatttttggttgtcacaacaggctgggggtgaggaggctatgcggctgacatctgaggattctgctaaatatcaaaaggcacaggatagccccatcgccagagaattgtctggccccaaatctcaatagtgctgagactgaaaagccctgctctagttgagaacatgtaggatggaaggatggtcccttaggttctgatacaggtgagagtgtagcagttcttcctgttacacatcaggcaaatgtagtttgtatggtggaagcaaaggtaagagaccctaacaagatattatagcagccttgcgaggttttatgcagcactgtgcgaatgcagaatgggtaatagcaggtatgttgcaaagggtgatgaacaggcataagttcagaggggaggatgagatgtctggcaggatgcattgttcagggaggggcctgtcctctccttcatcatcttttaccttcttctgcccccagggtgtggatattaatgcaagaggagagtggaagaccttgccagcccctcttgaccacattaatcttcatgtccgtgggggctacatcctgccctggcaagagcctgcactgaacacccacttaaggtgaatgacaggactcaggttttcctttacatttcagttagctcaacaatttgtgatgaagtctaccaaaatgtaagcatcactttcaaacccacatgcaattctactcaacacttgttttttctttgttttgttgtttgtgtgttaatctttttcagactctatactttttgtctaattattaacaactcttttaagtctaagggagtgagatgaaaggtctaagaatgtcattttttaaatctcacatctgacatggaagtcaaaataagagcaaccacaattcacaagagcttttcagaagctgttgttttagaactgtatccagtagattttgaaagactgtaattcatgtccttccttaaaccctttgaatttcttttcaaacacgctaacagccaggtggtcagcctccttggtttgccaggactgatgcattttagcaccagaactctcctctcttgagatgcttctcaattctgggtaaaccaggtcagttgatgcctctatctgccttggccacactgctcacccatgtttctttactcttgaatcacttattctcattttaggagggtcaggatccactttccaccctcctagaatctcaacttcctctttcttttctcccgctaagagatttctttcttgtgattcaaaagtggattcaaaaaaaccctcaaaagtctatgtcactgaattttgctttatacgtaattgattccaaaattatagattccatctgtactaaagaggtgtgcatttatatcttcatgcctttgagagtattaacctatttgtctttaatagactaggagttctttggaagccagaaacctgtcttttcttttgaacctctcttactgctttaatttttcaaattctagacttttttatgatactaatgggaaatatccctaaatccaataccagttggcttccattttctaactgttcaccttcaagctgttctgtacagtgataccaaattgatttttccaaaatgaaaatctcaactggttgctcccaggcttgaagtccaaagtctttcattaatagggtattcaaaaccaatcacaacctggttccacgttaccttaacaactcttatctcctgccatacctccatgtacatacagaccaggtatgccaaaaaactggcgatttcccaaacatacccatgtattttactgcatgtgggcttttgaatttatcctttccaacatctgtgcctggtgtattcttaatgatccaaatgaaactttacgtttcagcagcaagaagtctttccctaatcttccagcagaggaagcactgccacttccaagtttctggtcatttgtaatatatatttatttgctccttagatgattttgtctttcttctttagcagtgttagcatttcaatagtagttgcatactctgtgcatgaaaattgtagtatctgaagtgtttaggaccatctaaatctattgttagttctttgttgctgactttcctttatgttgacttattaccttgtgtgcttggtgattttttgtttcatactgtgataatcttaagcatctaaatgtgggtctccttcctccagagatgatttgccttctcctctatttgcaagccaggaattccttccatctgacatcacgttaacttccatcaaggatcccggcttcatgtgggaatcagaggttcacattctgtaccttggattactaggcttaatagcccaattttaaccttgctgtgggaatttgccacatggagattctaggttttgcttactaagcaccctttgagttctagctcagtgttttgctatcctgttattgttttggtctcttgagtatattccttactgtcttgcaaatccaagaacattttagcaggaatatatgttataatttatctaggatcaggtaatattttactgggtaagtctccagaagaatatacagtctaccatatttgtagaactgtgtttctggactcctagaatatcttaaatttgtgttgttttcactgtctgcgttcattttttagtgaatgtgcctaatttttcctataatattgaaggtcgttcaggtcaggggttgtgatttattaatttttgtatctcattgacttcctagaaatgactgctactcaatacatgaatatttaaagaaagcagatgattttgttgataatggaaactaactctcttgcatagtgaaaggctgaactgtggaagaatacagtggagaatgtgagtccagtgagagacagaggaggaataggaagagcaggaaactgagaggttgcctagagagtgacagagtgaggagagattccaaataaaaattgctctctatcctcttcttcctctatgtccatctactctaccatgtctttaagtaatgtgttgtgtttcctattctaaattctaaagtagatcattagaatgatttatttttctttcaaaacaaactaataataaataatcagatacattaccatttagtagatggaccttagtgtatgttgttgctttctgagtataaatggtccttaggcaggcgaaaatgtatcttcctcacagcactggacacttctcctgagggcatcattgctaaagtgatctgactgaaccagttattgcctaagatttctttctcttctcatactctgtattccgaacagtggttgcagaagcagcttttatttgagctattgcagtgcctctggtgcttaaattcttgcctccaacgtagatgttattgttaatgtttggggtgtttctatctcctgtgacactgttgatattatagaaaaatgcatctgtcgattttgtgtttgtacctcaagaaacagaaccatctgctgctagtatcttttccagtttgaaatttgatggaaatattctcagcccagttggcaaaattgtctgactcctgtctttgtctcttgaatcttgttccccacagtcgaaagaaccctcttggtcttattattgccctagatgaaaacaaagaagcaaaaggagaacttttctgggatgatgggcaaacaaagggtgagcgctgttacaataatgttgctgtttcccaacctgcgcctgtgacttatggtccttcactcctgctggtcattcagctgtgggagaaatctcagcaggcacagtagcaagagtcacttaagtattttgtttctggttgcaccattcagggatagtggtggacgaactactgacgaaagaaaaatgcatttgtatctctgacagttctcccattcgccagtgatacctataatggctcttattttattgtcaatgggtgcttagatgagaaggtttcaagactgttccctaattctatgttaatgtcttcctccgaaaattcttatgagcaaatgttgacgatataaaaatcatgcacctgccagtgaggcagtgagaatatactgttctagtgtgtactcagctagccatacgttttagcatatttgtgggtccagtatactaacaattcttgttcttcaagtttaggaaatagattcctttgaagcatatgccttggaagcccttggaagggaatctttgcaatgttctggtagaaaagagaaggaaaaacaatggcttggccttggagactcttgtccctctaatccaatatgtagattaaaaattaattatttatttggtagtcaaatattttgttggcaaataaagattgaatatatttaaggtggacgatgtgaggatttaatatatgtaggcatagtataatgattaccacagctattttaatgaacacatccatcactaccaatgctgcagactggatccccagaacttattcatctaagaactgaaagtttgtacccttgaccatcatctccccattttccacttctgcaggctctaagaacaactgttgtaggctctgcttctaagagatgaacttttttagattccacatatgagtgagaccacgcagtattggactttctgtctctggcttatttcacttagtataatgtcctcctaagtcattcatgctgttgcgaatggcagaatattcttctttctatgtctgaaaaatattctactgtatatatgtaccagaacatctttatctattcatccactgatagacacttaggttgttttcatatcttggctactgtgaagaaagaaattaaaaattgaaatgtaagggctaaaattgtaaagctcctagaagaaaacatagcaaaaaacctccttgacgtagtcttggcaatgactttttggatatgataccaaaagcaaaggcaaaatgccaaaaagtaaacaggcgtgactacatcaaactaaaaggctcctgcacagcaaaagaaacaatcaacaacatgaaaaggcaaactacagaatggataaaaatgtttgcaaaccatatatctcagaagagattaatatcaaaaaataaggaacatatgcaactcagtagcaaaagatcaaatgacccaattaaaaagtgggtgaaggacctgaacagatgtttttccaaggaagacatacaagtggctaactggtatgtgaaaagatgctcagcatcagtaaatgacacaggtatgcaagtcaaaaatcacagcgagatgtcacctcacacctgttagcatggaaatcataaaaaagaaaggagagaagtgctggtgagggtgtggagaaaatagaattttttagactgttggtgggactgtaaattgttacaaccattatggaaaatagaatggaggttcctcaaaaaattaaaaacagaacttccatacaatcccatgaattcccacttctgggtgtatatccagaggacatgaaaccagtatctttaagagatatactcactcctcccatattcattacagcattacttgcaacagccaagatatggaaacattctaagtatacattgatgaatgaatacaatggaatattattcatccataaggtaaaggaaatactgccatttgtgacatcaggatgtaactgaaaagagtgggagtgtgaaatctgttcttctgtggtgggcaagccggagtctgacttgtctttctgtcactttcagatactgtggccaagaaagtatatcttttatgtgagttttctgtcactcaagtgagtagcatatttttatgaatcttaggtgtgggctttggactgaccattagcacatctgtgcttgtgtatatgtgtgattatatttgtaactttatatgcattattggctataggtgagcacatttctatttatgatttcatcgatgttttcaaaaggaggcattaatatagcaagtagtgtttctaaatatagtttttaattatctgtgtgtttttatgattgtatcaaattagaggattatcaaactaatgttgtacttcttgagcagacactagtagagaaagcagagaggcattcatggcagtggggggtatccagtctggaatagaatatatgagtgacttgagaatctgtgtattacaggcatacctttatgcataattggagttaattgttttgcagaaccacttggaggtgactatttcacaatcaacctacaaggaccccaataatttagcattcaatgagattaaaattcttgggatggaggaacctagcaatgttacggtgaaacacaatggtgtcccaagtcagacttctcctacagtcacttatgattctaacctgaaggtaaaaacccattttgttgagatggtacattgagaattctccatagcaccatgatgtttcttcttgccaagtttgcatgggtccctgaagtaccagggcacctttgatgcatgttttggggaattgagagggcacctttgatgccttttttggggaaaaaaatgaggtggccagagctagaatgagttgggtatttttcttcttattcccttctctgcctatcagtgttcccatctctctagctggtttcacttgcttttcccaaaaatagaataattatgatgagacccaggaacagcaaagttggaaagtggggaatagcctgacattattagactgtgaattttgtatgactagcacaaataagaattggtatttgaaaaaggccagcttggataggaaacttgtggtcaggctttggaggtcttagttaccaacttgaattaattctcaagcagtctcatattgatccttgaatgaaggctgtgctactgtgtgtgagcattgttgggagtgggagtgggggctggggactagtagaacagggaagtacaagatggtttagatttagaggagactgggagaaggatgataatctttagaatgtgattttattactccagacgtgtgagaactttaacttgggaagtgctgtctagagaagcatcaaagataagaaaaatatatggaaaatattaaatatttgaattaataggattcaaggaaggtttcaaatttgcagcctttatgcttagaaaaataaagatgctgggatgttagaagtggaaagaaagatgattttatttccacctctcaattttgctgttgccaaaattgaaattcaaagaaatgaattagaattcccaatttgccctgatgtgattattattcattgtatgcctgaatcaaaatatttcatatactccataaatatgtatacctactatatactcattaaaattaaaaattaaaaaaagaaatcatttgtccaatatactacataaatgcgagcatgataaccaggtcatatgattcttattgctgtgttctttctaccactccacgccaatgggggatgctggtttggggactggagagcaagaggatcagctcactttgagatgacaccatgtgtcatgctaaagaggaagtgcagaagacacccttccagacaagacacagagggctaagaggagttagggtagaaaagaataaggggtgatcgcgacaggttttatttgacctaattgttttcattatgctatgtacaagattctgctagaggggagtcatatgccctgttactgctaaatagattcccccactgtacagttctcttcttataagctaaagtgatatgttgcttggatggttgaaagtctggactgatgtctatttgtttttccaaaataaataaataaataaagtcttagattttgcaaggcctttctcccaaagatgaatttccttgtgatttctgcattcctacaggtcgccattatcacagacatcaatcttttcctgggagaagcatacacagtggagtggagcataaagataagggatgaagaaaaaatagactgttaccctgatgagaatggtgattctgcagaaaactgcactgcccgtggctgtatctgggaggtaaccatgctgatggggttcatgtgcatgaaaatctccacacctaatctatagtttcttaagcatagcagtggcacttatataactacttaaaatccatagaaaggacttcctaagggacatgatctggatgtgacaagtaggtggggacatgtggaaaactttttaaaataaatattttgcttggagaccaggaaattaaatttatgttattgccaagtgataagtgataggctggttttattgtcatataaaatgacttttctaaccctgtttaggttagagaactttaagaccacatgctgtgctgatctatgactttggccttacttttcaggcatccaattcttctggagtccctttttgctattttgtcaacgacctatactctgtcagtgatgttcagtataactcccatggggccacagctgacatctccttaaagtcttctgttcatgccaatgccttcccttccacacccgtgaacccccttcgcctggatgtcacttaccataagaatgaaatgctacagttcaaggtaaacacggtacatatatcaggcagtgataagacccttttcagttccattatctttttctggttcaggtcacacaaccctaaaataagttaatcatgctacattagactatgtcattatccagagaacattgagaaatcattgagggaacaatgagacctgccctaattttcatttggaaaagattactgtggctactgttaggaaaatggttgggagagcaagagtgggtacggagagacaagttgggaggctgccagttaggcaggtcaagtgagggcttaggtttggactaaatactggaatgaaggtggagaacagtgcacctagttgagattcaggaagttgggttacagggtctggtgcttgattgaaagcaggcgacaatggagagggaagcatcaagaatgatgaccgcgttggtatcttgcatcttaatatggatggtgctgacatcaaccagaatgggaatactgaaaaggtttgtgcttgatcaatgtaagatgatatgttcagtttgggatactgaatttgagatacgtataaaatagccaccaacctgcagcgatttcatttctttccagaatttaattgcatttaaagactagggatggactagctgttacgtctgcttctctattaaactaatcttctcaaggataggaatgtgccctttcctctttgtgcttctgaagtctaatacagagcctggcagatagttagtgctgtaatgtaattgacagagtaagtgaaagtgatcaggacattgtcacattgcctgaaaatttctttacaatctgacatcaacccgaattctgagtttttgtacatcgtctaatgcagggatgatgctgttgtatgtttgtaccctcatcatagcactagcatgttgtaggcacctaatgggtttgaagtgaatgaacttccttggagttctagccttaaccattgactactctacctcttgaccatacagtagctctttccaaaatatttgcctctttctggcccactttaattctctctgccttcgtggttgttattcttcaccagaatgacttgatctcttttctgtgtttggttaatgactaccaagtttctaatactctagattgtatttctcctgggagaccatctcagtctcccagaaacaatgttaggcatttccttctctagagtctcacagcacttctacatagctctcccttagcacacatcacccaggtgttgtgagctgctctcttacacttctcatttgcttgtgaatttcataaaaccataacactgccttattgagctcacatccctagtgtcttgtgcagtgtcaggcagggatgtagtaggtactcatgaatcagtttagataccaccttcagcaaggacattctgattattttaatcaaatagatttcactttggggagacacgttatttttcaattcagaaaagttttaaggtatttatatattctcatatacccacagaaaataacaagtaacatattcataaataccacgctgattccagaatgattttctacgttagcaccaatgtcacaatgcttatattgatgcagtagaggccttagtaatgagaaatgacagacaaacatattaaatctgacattgttatttgatgtgttaattaaatctcagacatcataaacttaaagaagacagaaacatagcatctgaacttttgtccaaaaatcaaaaaggttctgctaagggtataggtttcaagagtagtattcttgcctaaaatcgttttcctctggcctagatttatgatcccaacaacaatcggtatgaagttccagtccctctgaacatacccagcgtgccatccagcacccctgagggtcaactctatgatgtcctcattaagaagaatccatttgggattgaaattcgccggaagagtacaggcactataatgtgagtggcttctagtgtgactcagagttgatggctacctgcgccttcgctgccaggtccattgtccttggatgtatcctggttcaaaacatcacattgtccacttccagatccatggatgagttgtttccttcagacctattcttacaggaaatctttagcattctggaaataattactgaggcagttgagcgtgcctgaggattcatccaacaaatgtttatggggtgccttctctagattaggtgctgctccttatagacaactgaggtttctcttctcatgacaacaaataataagtaaataacagagataatttaagttatagtataaaaaggagattgtgatagtgataattgctgtgtagccaaaagagcagggtaattgagggttatggtgtggttactgcttctgatattggggtcagagtagatctcgccaagaaggtgatattttaataggacctggatgagaaggagccacccacatgagacagggcgaagggaaagagcatttcagacagagggaataggaagtgggtaggccaggagatgaagcgaagctggcatgctaaagaaaagaagtctagtgtggttggagcaatggaggaagtaagcaggtgagtgctgggagaggaagctgcaacgccggttgagggggcagcttcagccttgaaggcttcataagatgtttgcatgagaagccatggaagaagcacaaatgggagtgacatgaggtgagatcctcgtaggaatatcgctttgagtgctacgtagaaaatgcgctgaggggtgcaagggtggaaggcagtgctggtgtggagtgttcccagctgtgatggtgaggggagcttgtatttgtattgtagaggaccactgaaaggaggcagtgagagtgggaaacagatgaatgaagaactcctgggcttttagtggggatatctatgatattttaatcaaattgagtttcagttttgtttgggagatgaacagcttctgggtaggaatcaagtgttctgttgtccttgaaaagtcagctgctggaagcagagagaaaagcccattttctgtttcaaatctgcctttttgtgtttcagttgggactctcagctccttggcttcaccttcaatgacatgtttatccgcatctccacccgccttccctccaagtacctctatggctttggggagactgagcacacgtcctacaggagagacttggagtggcacacttgggggatgttctcccgagaccagcccccaggggtaaggacagagcatttgagatctgtgtctctgcttctctccacccacactgctcaggctttgggcttcatcttcccaaactccacttggtcgtcacattctgcttttaggcgagtgggccaattctcaggctcctttgtttcatgtgtttaattgatttcatggagaaaactagacccatcttagcaagcatatttttgttgagtttctttctcaggcataatgtcttttaaactcctactgcttctccccatgactctccagtacaagaagaattcctatggtgtccacccctactacatggggctagaggaggatggcagtgcccatggagtgctcctgctgaacagcaatgccatgggtaaggccatccagcgcctcccttattttggggggataccagtcatgcctgagtcagtttagaatgtgtttagcctaactgttccttgaagtcaaaatcttcattttacgggcactgctgtttattttttctttgtgtttagcctttctgttcatttcagtctaatatcatgtgataagaagatttaacccaactcttattttggtaaaaatcacataagaagggatagtaaaaccacatgggtcccaaatgtcttggaggtcagctcgtgagagccagttataaaatttgaattagggtaaaactatgggtcagagaagttagtctggggattgtgagggtgtatggtatgttgaaaagttacctatcgggtactacgtttgctatctggatgacaggattcataccccaaacttcagcatcgtgcaatattcccatgtaacaaatgtgaacatgtacctccttatccaaaataaaagttgaaatgtaaacataattttaagagtagaacgacaaaatatagtaaaatacaccaaaggaagcaaacccaggaatgggacatttagacttccactgaacttcttcagttctatgtgattatgatagaaaatactggctcttactactctacgatagggagggtgcaggaaatagagaatgtgtggatttcaggggtgattcatgacgtggaaagtttccagcttgattagcatttttcttcattttcagatgtgacgttccagcccctgcctgccttgacataccgtaccacagggggagttctggacttttatgtgttcttggggccaactccagagcttgtcacccagcagtacactgaggtagggagaaatccaattgtttatcaagtacttatatagcacattctgggtgccagagcccacattcattagtataactctcagatgataactggaattattggtattacttggaaagagattatagaataaggaaaaataaatacattctaatcaccattaaatttatagcctctgtaagcattgcagaatagcagaagttacagtggtactagtggtggtgatggtagtgatagtagtatggtggtggtggtatttgtggttatatggtggtggtgatggtgatgatggtggtaggggatgatggtggtgatagtgatgtgggaatggtgataatgatggtggtagtagtagtggtgttggtgatggtgatgatagtggtgggggtggtgttgatgggagtgttggtgatggtggtgatagtggtggtgatggtgacgatgatggggtggtgatggttggtgtttgatagtgatggtggtggtggctatggtggtggtagtggtggtgacagtggggtggtgtgaagaatatggtggtggtagtggtggtgatggtgaaaatagtgatgatggtggtgaccatggttgttgtggcagcagcagcaaacacttatgtactacctactgcacatcactgatttattacttgctgcatgttagagcactttgcacatagtaactcattcagtcttcacaaaaggactgtgagggagatgctattattatacccttatttacagatgaagaaactgaagcactaagagattacttaatttttgcctaaggtctcacagctagcaggactggagcctgtatctaagccaggcattttgcctctgattctgggtttcttaaccagttacctacagtgtctctaggaatggagtgaaatcagcttttccataatttttaagaaggagctcaagtctagcagaaagctttctccaagtatcctagtggctctatatcctgtcagttttgatgtggaattcaattagttagttgtctagcttggggcacagaaaaatattcttattacttgatgtaaaacttcaatctggtgtctctgttctgaggactaatattttctgtctattttctagttgattggccggcctgtgatggtaccttactggtctttggggttccagctgtgtcgctatggctaccagaacgactctgagatctccagcttgtatgatgagatggtggctgcccagatcccttatgtacgttctcagtcatggctctggagtttgaaaactaacccaggtgcctctgtgtctggcttcatttgtctaatgtttgtgagattctataaagacataatgttctttttcagacaatatcacagttagcctcaccccagcacagtaatagaggtaagggcccttgtttccatcttctagagatgatagctcaagacttactgtgatttcccagagggggagataagctggctccagggctctttctactatctcatgcttccttccatttctttcacatgacttcaaaacatgtagtcaaaatgtccttggttccataagaataaataatatccacagttcttttacttaattcctgaaaaaaactaaccccaaaccatcagaccattgtatatgtggatacgacctcagttcccgcagccctggtgctgtagcacagtgtcccatgagctctgagctaatcactgatggaatacacggatcctggaatgggttccagaggatgtacacatggaaataaagcttatccttcactggaggatgggaggggacccagtcatcaggcaactgatccaatgtaccatcgcatatctaattgtattctacatttctcttgttttacagtagctccattagtggaacatagcgtttccattagtggatagtgaaatgcaatatttcattctccagaagaatgtagtgtctgatttccctcaagattgggtattccaaagcaactgtacattgttgctttgttttgacttgttttgcagtagatttaccatccacattgtattagccctgggtagttaatattattttttctaagcatgaaccactgataccaggggcagcctcttgagggaggtcatcacagtcactcctgatagtggcagtttacaaagcactgtccattccagtgttcgtatttatcctcagaatagccatcttagagaggcattctcatcctattttatgctgactttgatttttttctatcttatcactgaacgtttgagaaattaagtgaatttcccagcacctgtacctaacaaatggcagagctcggacttgaaagcatcaacaagaagctatctggaattccaccatgggtggtggaggcttgttctcctataaagcttgggcgtgtacagcagcagcctctcagctccccatgtcctcccgcaggacgtgcagtactcagacatcgactacatggagcggcagctggacttcaccctcagccccaagtttgccgggtttccagctctgatcaatcgcatgaaggctgatgggatgcgggtcatcctcattctggttagtcctgatgtgaatgtgtgcggtctgtttgggagcaggtatgggttttgttggagaaagtgttatactttatttccatgttgcaagtagataaattgaagtgtagtaagaaatgtgtatttccctggactcacagaaactctacagttcaggtagaagccaacaagttcgccctggaggagttctccttcattctgtttctcttcattctgtggctttgatttttcccaactgacttatgctttgatttcaggatccagccatttctggcaatgagacacagccctatcctgccttcactcggggcgtggaggatgacgtcttcatcaagtacccaaatgatggagacattgtctggggaaag

SEQ ID NO: 1238 - DNA, 473 bp, Homo sapiens
  full length sequence of bloodCirc_02184
gaacaatgccacacaaccaaagaagtctattagcttttttgctacaatgaaagcaacttcagtgaaaggatatactggtgcaaatcaaagcagaatggctgtgtccaaaaccgtgcttattccacctgaactgaaaactgtagaaaaaccaaatcccaatataaagacaacacaggtatttgacataaatggaactgatgttactccccgacctctttaccatccagatccacttactggtacagcaaaaccaagtaaactcttgacatcacaagaaggatcacttggatcagaatttatatcttcctatagcctttatcagaatacaataaatcctagtacgttagggcagtttacaaggtcagttttaggaagcagtacagtttctaagtcaagtgtatcagcaagtgaatcaatagcagaagacctggaagaaccatcctataaacgggaaagattgactagtttcacag

SEQ ID NO: 1239 - DNA, 459 bp, Homo sapiens
  full length sequence of bloodCirc_00394
ttccaagatgagatgggattctccaacatggaagatgatggcccagaagaggaggagcgtgtggctgagcctcaagctaactttaacacccctcaagctctacgccagcttctgttactgatgtaaggatgcagagtcctgtcaggagttaggtgtcaagtgaagtctccttgttatggggcagtgcagctgtaggccaagctgtatctgtttgggaagggagaaaaaacagtagctggcatccatatccacttctccgggtttgaggaactactggccaacctactaaatgaacaacatcagatagcgaaggaactatttgaacagctgaagatgaagaaaccttcagccaaacagcagaaggaggtagagaaggttaaaccccagtgtaaggaagttcatcagaccctgattctggacccagcacaaaggaagagactccagcagcagatgcagcag

SEQ ID NO: 1240 - DNA, 314 bp, Homo sapiens
  full length sequence of bloodCirc_21181
cacttgcacctcctgcgccgccgccccccatccaaggatatgccttcaagcctccacctagacccgactttgggacctccgggagaacaatcaaattacaggccaatttcttcgaaatggacatccccaaaattgacatctatcattatgaattggatatcaagccagagaagtgcccgaggagagttaacagggaaatcgtggaacacatggtccagcactttaaaacacagatctttggggatcggaagcccgtgtttgacggcaggaagaatctatacacagccatgccccttccgattgggagggacaag

SEQ ID NO: 1241 - DNA, 315 bp, Homo sapiens
  full length sequence of bloodCirc_13696
gaggaaaaaaagcaagagcagaagtcgtagtcatgaacgaaagagaagcaaaagtaaggaacggaagcgaagtagagacagagaaaggaaaaagagcaaaagccgtgaaagaaagcgaagtagaagcaaagagaggcgacggagccgctcaagaagtcgagatcgaagatttagaggccgctacagaagtccttactccggaccaaaatttaacagtgccatccgaggaaagattgggttgcctcatagcatcaaattaagcagacgacgttcccgaagcaaaagtccattcagaaaagacaagagccctgtgag

SEQ ID NO: 1242 - DNA, 389 bp, Homo sapiens
  full length sequence of bloodCirc_17137
gagattacctggggcaattgatgttatcggtcagactataactatcagccgagtagaaggcaggcgacgggcaaatgagaacagcaacatacaggtcctttctgaaagatctgctactgaagtagacaacaattttagcaaaccacctccgtttttccctccaggagctcctcccactcaccttccacctcctccatttcttccacctcctccgactgtcagcactgctccacctctgattccaccaccgggtattccaataactgtaccacctccaggttttcctcctccaccaggcgctccacctccatctcttataccaacaatagaaagtggacattcctctggttatgatagtcgttctgcacgtgcatttccatatggcaatg

SEQ ID NO: 1243 - DNA, 937 bp, Homo sapiens
  full length sequence of bloodCirc_02329
ggggattcccgaagtcttccgttttctgagaatgtgagtgctgttcaaaaattagacttttcagatacaatggtgcagcagaaattggatgatatcaaggatcgaattaagagagaaataaggaaagaactgaaaatcaaagaaggagctgaaaatctgaggaaagtcacaacagataaaaaaagtttggcttatgtagacaacattttgaaaaaatcaaataaaaaattagaagaactacatcacaagctgcaggaattaaatgcacatattgttgtatcagatccagaagatattacagattgcccaaggactccagatactccaaataatgaccctcgttgttctactagcaacaatagattgaaggccttacaaaaacaattggatatagaacttaaagtaaaacaaggtgcagagaatatgatacagatgtattcaaatggatcttcaaaggatcggaaactccatggtacagctcagcaactgctccaggacagcaagacaaaaatagaagtcatacgaatgcagattcttcaggcagtccagactaatgaattggcttttgataatgcaaaacctgtgataagtcctcttgaacttcggatggaagaattaaggcatcattttaggatagagtttgcagtagcagaaggtgcaaagaatgtaatgaaattacttggctcaggaaaagtaacagacagaaaagcactttcagaagctcaagcaagatttaatgaatcaagtcagaagttggaccttttaaagtattcattagagcaaagattaaacgaagtccccaagaatcatcccaaaagcaggattattattgaagaactttcacttgttgctgcatcaccaacactaagtccacgtcaaagtatgatatctacgcaaaatcaatatagtacactatccaaaccagcagcactaacag

SEQ ID NO: 1244 - DNA, 257 bp, Homo sapiens
  full length sequence of bloodCirc_08087
aagcacagatcagatttctaaaggccaaactccatgttatgcaggaggaattggataatgttgtatgtgaatgcaataaaaaggaggatgaaattcagaatttaaagtctcaagtaaaaaattttgaagaagattttatgagacagcagcgaacaattaatatgcaacagtctcaagtagaaaaatacaaaactcttttcgaagaagcaaacaaaaagtatgatggattacagcaacagttgtcttcagtagaaagg

SEQ ID NO: 1245 - DNA, 268 bp, Homo sapiens
  full length sequence of bloodCirc_22808
ctcttagtaagattacacatgcaagcatccccgttccagtgagttcaccctctaaatcaccacgatcaaaagggacaagcatcaagcacgcagcaatgcagctcaaaacgcttagcctagccacacccccacgggaaacagcagtgattaacctttagcaataaacgaaagtttaactaagctatactaaccccagggttggtcaatttcgtgccagccaccgcggtcacacgattaacccaagtcaatagaagccggcgtaaagagt

SEQ ID NO: 1246 - DNA, 358 bp, Homo sapiens
  full length sequence of bloodCirc_06741
acaaggcgcctctgtcgaagagccttctgctggtccccagtgccctctccctcctgctcgccctcctcctgcctcactgccagaagctctttgtgtatgaccttcacgcagtcaagaacgacttccagatttggaggttgatatgtggaagaataatttgccttgatttgaaagatactttctgcagtagtctgcttatttataattttaggatatttgaaagaagatatggaagcagaaaatttgcatcctttttgctgggttcctgggttttgtcagccttatttgactttctcctcattgaagctatgcagtatttctttggcatcactgcagctagtaatttgccttctggatt

SEQ ID NO: 1247 - DNA, 585 bp, Homo sapiens
  full length sequence of bloodCirc_15306
cttcaaaagcagtggactgtcttttggattcaaagtgggcaaaggccaagaaaggagaggaagctttatttacaaccagggagtctgtggttgactactgcaacaggcttttaaagaagcagttttttcaccgagccctaaaagtaatgaaaatgaaatatgataaagacataaagaaagaaaaagataaaggaaaagctgaaagtggaaaagaagaagataaaaagagcaagaaagaaaatataaaggatgagaagacaaaaaaagaaaaagagaaaaaaaaagatggtgaaaaggaagaatccaaaaaggaggaaactccaggaactcctaaaaagaaggaaactaagaaaaaattcaaacttgagccacatgatgatcaggtttttctggatggaaatgaggtgtatgtatggatctatgacccagttcactttaaaacatttgtcatgggattaattcttgtgattgcagtaatagcggccaccctcttccccctttggccagcagaaatgagagtaggtgtttattacctcagtgtgggtgcaggctgttttgtagccagtattcttctccttgctgttg

SEQ ID NO: 1248 - DNA, 112 bp, Homo sapiens
  full length sequence of bloodCirc_21571
ataggaaaggaacatgttggcttgaaggctgtgactgaaatcctccaagatattcagtataaggggaagtccaaaacaataccttgctttaatcctaacactttattaccag

SEQ ID NO: 1249 - DNA, 1669 bp, Homo sapiens
  full length sequence of bloodCirc_13002
tgcttaaaattgaacaaacaggaggagaaaaaggaagagaagaaaacagcaatgaagtcatttaggaatgataagcaaatgtggccaggtgaggtggctcacacctgtaattacaacactttgggagtccgaggtgggtgaatcagttgagctcaagaatttgacaccagcttgggcaaaatgatgaaaccttgtctctacaaaaaatacaaaaaaaattagctgggcatggtggcatgcctgtagtctcagctacttgggaggcggaggtgggaggatggctcaagcccaggagacagaggttgcagtgagctgagagcacgccactgcactccagcctgagcagtagagccagaccttgtctcaaaaaaaaaaaaaaaaaaaaggtaaatgcagagtattccagagattgtgacaaactcttagctatttctatgtttttgagatttccagcaaggttgtgccaatggctggaggggatagaagaggtggtccattctagggcaatgaagtgagttagataatttttcaaaaaaaataataaaattgaaagttgttctgcttttaattatcatatgtgcctaaaatttttttaaatgccagtggtaaaatacctctccctatccttattcatgtagaccactcctaccatgccgtaccttttggtacaccattggcttccaggatatttaaaaactgaagaaaataccgaaaacagggttacaaaaattttggaatattttaaatgtgttaatttaataaagtaactctttgtacaaaggcaatttaattgagctattcataggatagttgtataatatagaaatatgtaacttacactgcactatgataaatgcctgactttcggccctgtcaggttatcacttgtgactatacatctgacctttttttgattttctttatggctatgagggcagaccatacacttttcttgttgctgttcttttacctattgcacccccttaaccagaatgggccctttttaattggtaactaattgccttaaaggtatgttgagaatatagcattctttgaaggtatcaacaaatttataagaaaagtttgtagagcatgaaattcaggaaatgttttctttctttcttttttaatcaattaagtaattagatttagttctactaatattactgatttaccttaaatcgtgaatccagctgatgaactttttgaaatgtgaagcactggttaggaatttgagaactgcagatgtgagactcatctagatcttagttatgattttattgttcacttcatttgaaggacagagaaaaaaaggcaggggttgaacataaatctcagagactgtatgaggattaatgaaattatgtcccttataaaacatttgagttttttttttggtagaatgccagtatgtgagaataaaggaggatattcaccagtgtcttctaacatttaaaatgttaggagaagcagatcatatttgaaaatgaaatttagtctgtggttaatagtttatttcctcttaaaattgttatcaacttccataaatgtaaattatatatttttattttcatattttttgatagtcaatacttgtttccaacatggacaatattaaactgtaaagtttctgaagtactccaggtttctcaaatactcttatttccag

SEQ ID NO: 1250 - DNA, 330 bp, Homo sapiens
  full length sequence of bloodCirc_02797
tgcagcagctgtggctcctaagaagaagattcaaaccactctgagtaatctggttgttaagggcacaaacttgatcatccaggaaacacggcaaaaactcggaataccccagaagagcctgtcttgctctgaggagttcaaggaactgatggacctgccgacgtgtggagccaggaacttaaaacaacatttagccaaagccacagcttcagggattatggggagcccaaaaccagccatcaagtccatctcggcctcagcactcttgaagcaacagaagcagcggatgttggagatgaggagaaggaaatcagaagaaatacagaagcg

SEQ ID NO: 1251 - DNA, 441 bp, Homo sapiens
  full length sequence of bloodCirc_01565
tgacctgaaaaaaatgtctggatttctagagggcttgagatgctcagaatgcattgactggggggaaaagcgcaatactattgcttccattgctgctggtgtactattttttacaggctggtggattatcatagatgcagctgttatttatcccaccatgaaagatttcaaccactcataccatgcctgtggtgttatagcaaccatagccttcctaatgattaatgcagtatcgaatggacaagtccgaggtgatagttacagtgaaggttgtctgggtcaaacaggtgctcgcatttggcttttcgttggtttcatgttggcctttggatctctgattgcatctatgtggattctttttggaggttatgttgctaaagaaaaagacatagtataccctggaattgctgtatttttccagaatgccttcatcttttttgg

SEQ ID NO: 1252 - DNA, 348 bp, Homo sapiens
  full length sequence of bloodCirc_02928
atcaatgaactgagccatgttcaaatccctgttatgttgatgccagatgacttcaaagcctattcaaaaataaaggtggacaatcacctttttaacaaagaaaacatgccgagccatttcaagtttaaggaatactgcccgatggtcttccgtaacctgcgggagaggtttggaattgatgatcaagatttccagaattccctgaccaggagcgcacccctccccaacgactcccaggcccgcagtggagctcgttttcacacttcctacgacaaaagatacatcatcaagactattaccagtgaagacgtggccgaaatgcacaacatcctgaagaaataccaccag

SEQ ID NO: 1253 - DNA, 499 bp, Homo sapiens
  full length sequence of bloodCirc_03884
aatttggatttaacaaaaaggaagatgattcatgaagggccattggtttggaaggtgaatagagataaaactattgatttatacacgttgctgctggaagacattcttgtattgttacaaaagcaggatgatagactggttttaaggtgtcatagtaagattctggcatctacagctgatagcaaacacacgtttagccctgtcattaagttgagtacagtgttggttcgacaagtggcaacagataacaaagctttattcgtcatttccatgtcagacaatggcgctcagatttatgaactggtggcacagacagtttctgaaaagactgtctggcaggacctaatctgtcggatggctgcatcagtgaaggagcaatccacaaagccaattccattaccacagtcaacacctggcgaaggagataatgatgaagaagatccttcaaaattaaaagaggagcagcatggcatttcagtcactggtttgcagagtccag

SEQ ID NO: 1254 - DNA, 104 bp, Homo sapiens
  full length sequence of bloodCirc_04534
gtgtgggatgtgattggccgcagcctgattattgatgagggagaagatgacctgggccggggaggccatcccttatccaagatcacagggaactccggggagag

SEQ ID NO: 1255 - DNA, 307 bp, Homo sapiens
  full length sequence of bloodCirc_13232
taatctatgccagcaattatgacaatgttagcagaccatgcagctcgtcagctgcttgatttcagccaaaaactggatatcaacttattagataatgtggtgaattgcttataccatggagaaggagcccagcaaagaatggctcaagaagtactgacacatttaaaggagcatcctgatgcttggacaagagtcgacacaattttggaattttctcagaatatgaatacgaaatactatggactacaaattttggaaaatgtgataaaaacaaggtggaagattcttccaaggaaccagtgcgaag

SEQ ID NO: 1256 - DNA, 1599 bp, Homo sapiens
  full length sequence of bloodCirc_05898
gaagctgaatatggtgggcatgatcagatagatttgtatgacgatgtcatatctccatctgcaaataatggagatgccccagaagaccgagattacatggatactctcccaccaactgttggtgatgatgtgggtaaaggagcagcaccaaatgttgtctatacatatactggaaagagaattgcattatatattggaaatctaacatggtggacaacagatgaagacttaactgaagcagttcattctttgggagtaaatgatattttggagataaaattttttgaaaatcgggcaaatggccagtcaaaggggtttgcccttgttggtgttggatctgaagcatcttcaaaaaagttaatggatctgttacctaaaagagaacttcatggtcagaatcctgttgtaactccatgcaataaacagttcctgagtcaatttgaaatgcagtccaggaaaactacacaatcaggacaaatgtctggggaaggtaaagctggtcctccaggaggcagttcccgtgcagcatttccacaaggtggtagaggacggggccgttttccaggggctgttcctggtggggacagatttcctgggccagcaggaccaggagggccacccccaccttttccagctggacagactccaccacgtccacccttaggtcctccaggcccacctggtccaccaggtcctccacctcctggtcaggttctgcctcctcctctagctgggcctcctaatcgaggagatcgccctccaccaccagttctttttcctggacaaccttttgggcagcctccattgggtccacttcctcctggccctccacctccagttccaggctacggcccccctcctggcccaccacctccacaacagggaccacctccacctccaggcccctttccacctcgtccacccggtccacttgggccaccccttacactagctcctcctccgcatcttcctggaccacctccaggtgccccaccgccagctccgcatgtgaacccagctttctttcctccaccaactaacagtggcatgcctacatcagatagccgaggtccaccaccaacagatccatatgggcgacctccaccatatgataggggtgactatggcccccctggaagggaaatggatactgcaagaacgccattgagtgaagctgaatttgaagaaatcatgaatagaaatagggcaatctcaagcagtgctatttcgagagctgtgtctgatgccagtgctggtgattatgggagtgctattgagacactggtaactgcaatttctttaattaaacaatccaaagtatctgctgatgatcgttgcaaagttcttattagttctttgcaagattgccttcatggaattgagtccaagtcttatggttctggatcaagacgtgaacgatcaagagagagggaccatagtagatcacgagaaaagagtcgacgtcataaatcccgtagtagagaccgtcatgacgattattacagagagagaagcagagaacgagagaggcaccgggatcgtgaccgagaccgtgaccgagagcgtgaccgagagcgcgaatatcgtcatcgttagaag

SEQ ID NO: 1257 - DNA, 470 bp, Homo sapiens
  full length sequence of bloodCirc_14988
taactatgtttccggtagcccctaaaccccaggattccagtcaaccatcagacagactcatgactgaaaaacagcaggaagaagcagaatgggaaagcataaatgtgctattgatgatgcatggcttaaaacctttgtctctagtcaaaagaacagatctcaaagatctcatcatttttgacaaacagtcatcacaaaggatgagacagaatttgaaattgttggtggaagaaacatcatgtcaacagaacatgatacaggagcttatagaaactaatcaacagcttagaaatgaacttcagctagagcaaagccgagcagccaatcaagaacaacgagctaatgacttggaacaaattatggaaagtgtgaaatccaaaattggtgaattggaggatgaatcactaagtagggcttgccaccaacagaataaaataaaagatcttcaaaaggagcagaaaactttacag

SEQ ID NO: 1258 - DNA, 189 bp, Homo sapiens
  full length sequence of bloodCirc_22417
gcaacagctgaacagatgcgtctcgctcaagtgatctttgataagaatgattcagattttgaagctaaagttaagcagcttatggaagtgacagggaaaaatcaggatgaatgcatagtggccctacatgattgtaatggagatgtgaacaaagctatcaatatattgctggaagggaattcagacaca

SEQ ID NO: 1259 - DNA, 235 bp, Homo sapiens
  full length sequence of bloodCirc_06760
acaatcccatgaggttggtagaacagagattctcatctccgttttaactgaggctgctgacttgagtaaaccaatagataaaaggatatacaaaggaacacagcctacttgtcatgacttcaaccacctaacagccacagcagaaagtgtctctctcctagtgggcttttccgcaggccaagtccagcttatagacccaatcaaaaaagaaactagcaaactttttaatgaggaa

SEQ ID NO: 1260 - DNA, 636 bp, Homo sapiens
  full length sequence of bloodCirc_02652
ggggtaggacagttcactaaatagcaacttagaaaaacaggatctaggaatttctgtgaaaaaatgagctgggattatacagctgtgaaggtgagatcagaagctttagtggtcagacagctgagataagacagcacaaatgatacaactcttggttagccagctccttctccacgtagataatgtataatcatcagtcttcacataaaagctatcttgcaatttgtgttggaatggctatcacttgtgtttgtcttttacttttaaggaacaaatgaaccactacaactcttttggcctcttaagcatggcttaaagattgtaaatgcatttaacccctttatatatgtggttacatatattaatgttacttttataatttcctttctgcatttcattggaaaagttttggtttttcatattaaaatactgtaaaatatattcatacaaagactatgtgtaatatgttacataaagactgacataatgatgtccatcccatcctctcctcagtttaagtgaaagaacattcccagtaccctcctggatcacctctgtctacctccatcctaccactggcttgaggaaaccatcggcatcactgtgggctctggcattcctttgcttttctttata

SEQ ID NO: 1261 - DNA, 278 bp, Homo sapiens
  full length sequence of bloodCirc_13125
ggaagagacttccaccttaggatagtgttgcctgaagatttacaactgaagaatgcaagattattatgtagttggcagctgagaacaatacttagtggataccatcgaatagtacaacagagaatgcagcactctcctgatctaatgagctttatgatggagttgaagatgcttttggaagttgccttaaagaatagacaagagctgtatgcactacctcctcctccccagttctactcaagccttattgaagagataggaactcttggttgggataa

SEQ ID NO: 1262 - DNA, 295 bp, Homo sapiens
  full length sequence of bloodCirc_07060
caaaagcggcgccaggaaattgaacaaaaacttgaagttcaggcagaagaagagagaaagcaggttgaaaatgaaaggagagaactgtttgaagagaggcgtgctaaacagacagaactgcggcttttggaacagaaagttgagcttgcgcagctgcaagaagaatggaatgaacataatgccaaaataattaaatatataagaactaagacaaagccccatttgttttatattcctggaagaatgtgtccagctacccaaaaactaatagaagagtcacagagaaaaatgaacg

SEQ ID NO: 1263 - DNA, 370 bp, Homo sapiens
  full length sequence of bloodCirc_18429
agctaccatagaggaggcatactccaggtcaatgacaaaactagcaaaatctgcaagcaattattcacaacttggaacatttgcaccagtatgggatgtattcaaaacatctacagagaaattagcaaattgtcacttggatcttgttagaaaattacaagaattaataaaggaagttcagaagtatggagaagaacaagtaaagtctcataaaaagactaaagaagaagttgcaggaactctggaagctgtccaaaccattcagagcataactcaggccctccagaaatccaaggaaaattacaatgccaagtgtgtagaacaggagcgtttgaaaaaggaaggagctacacaaagagaaatagaaaag

SEQ ID NO: 1264 - DNA, 683 bp, Homo sapiens
  full length sequence of bloodCirc_07683
tcagaaaaatgggtaagaagagtcgagtaaaaactcagaaatctggcactggtgctacagcaactgtgtcaccaaaggaaatcttgaacctgaccagtgagctgctgcagaaatgcagcagtccggcgcctggcccaggaaaagagtgggaagagtatgtgcagatccggactctggttgagaaaatacggaaaaagcaaaaaggtctgtccgttacttttgatggaaaaagagaagattactttcctgatctaatgaaatgggcctctgaaaatggggcttctgtcgagggttttgaaatggttaacttcaaagaagagggctttggtttgagagcaacaagagatatcaaggcagaagaattgtttttatgggttccacgaaaattgctaatgactgttgaatctgctaaaaattcagtgttggggcccttatattctcaagaccgaatccttcaagccatgggaaacatcgcactggcctttcatttgctgtgtgagcgagccagccctaactccttctggcagccctatattcaaaccctccccagtgaatatgacactcctctctactttgaagaagatgaagttcggtatcttcagtccacacaagctatacatgatgtcttcagccagtataaaaacacagctcgacagtacgcctacttctataaagtcatccag

SEQ ID NO: 1265 - DNA, 668 bp, Homo sapiens
  full length sequence of bloodCirc_20868
gaatagtaaagaaacacatcataaaacctcccaggacataaaggtgagcacagaccctgtttggatcaagtcagttcctggagcctgaatgatgactgctgaatcacgggaagccacgggtctgtccccacaggctgcacaggagaaggatggtatcgtaatagtgaaggtggaagaggaagatgaggaagaccacatgtgggggcaggattccaccctacaggacacgcctcctccagacccagagatattccgccaacgcttcaggcgcttctgttaccagaacacttttgggccccgagaggctctcagtcggctgaaggaactttgtcatcagtggctgcggccagaaataaacaccaaggaacagatcctggagcttctggtgctagagcagtttctttccatcctgcccaaggagctccaggtctggctgcaggaataccgccccgatagtggagaggaggccgtgacccttctagaagacttggagcttgatttatcaggacaacaggtcccaggtcaagttcatggacctgagatgctcgcaagggggatggtgcctctggatccagttcaggagtcctcgagctttgaccttcatcacgaggccacccagtcccacttcaaacattcgtctcggaaaccccgcctcttacagtcacgag

SEQ ID NO: 1266 - DNA, 1233 bp, Homo sapiens
  full length sequence of bloodCirc_02331
ggggattcccgaagtcttccgttttctgagaatgtgagtgctgttcaaaaattagacttttcagatacaatggtgcagcagaaattggatgatatcaaggatcgaattaagagagaaataaggaaagaactgaaaatcaaagaaggagctgaaaatctgaggaaagtcacaacagataaaaaaagtttggcttatgtagacaacattttgaaaaaatcaaataaaaaattagaagaactacatcacaagctgcaggaattaaatgcacatattgttgtatcagatccagaagatattacagattgcccaaggactccagatactccaaataatgaccctcgttgttctactagcaacaatagattgaaggccttacaaaaacaattggatatagaacttaaagtaaaacaaggtgcagagaatatgatacagatgtattcaaatggatcttcaaaggatcggaaactccatggtacagctcagcaactgctccaggacagcaagacaaaaatagaagtcatacgaatgcagattcttcaggcagtccagactaatgaattggcttttgataatgcaaaacctgtgataagtcctcttgaacttcggatggaagaattaaggcatcattttaggatagagtttgcagtagcagaaggtgcaaagaatgtaatgaaattacttggctcaggaaaagtaacagacagaaaagcactttcagaagctcaagcaagatttaatgaatcaagtcagaagttggaccttttaaagtattcattagagcaaagattaaacgaagtccccaagaatcatcccaaaagcaggattattattgaagaactttcacttgttgctgcatcaccaacactaagtccacgtcaaagtatgatatctacgcaaaatcaatatagtacactatccaaaccagcagcactaacaggtactttggaagttcgtcttatgggctgccaagatatcctagagaatgtccctggacggtcaaaagcaacatcagttgcactgcctggttggagtccaagtgaaaccagatcatctttcatgagcagaacgagtaaaagtaaaagcggaagtagtcgaaatcttctaaaaaccgatgacttgtccaatgatgtctgtgctgttttgaagctcgataatactgtggttggccaaactagctggaaacccatttccaatcagtcatgggaccagaagtttacactggaactggacagg

SEQ ID NO: 1267 - DNA, 248 bp, Homo sapiens
  full length sequence of bloodCirc_04405
catccaggatattgcagtcctcttcaacatcatcatcattttcctcatgttcttcaacaccttcgtcttccaggctggcctggtcaacctcctattccataagttcaaagggaccatcatcctgacagctgtgtactttgccctcagcatctcccttcatgtctgggtcatgaacttacgctggaaaaactccaacagcttcatatggacagatggacttcaaatgctgtttgtattccagagactag

SEQ ID NO: 1268 - DNA, 153 bp, Homo sapiens
  full length sequence of bloodCirc_16983
acgagcaaaaatcaaattaaagtagatcttgtagatgagaattttacagaattaagaggagaaatagcaggacctccagacacaccatatgaaggaggaagataccaactagagataaaaataccagaaacatacccatttaatccccctaag

SEQ ID NO: 1269 - DNA, 262 bp, Homo sapiens
  full length sequence of bloodCirc_16811
ttttttaaatgtctagcatatctgtaaagatgccttagaaaaagaatcatggagaagtatgttagactacagaagattggagaaggttcatttggaaaagccattcttgttaaatctacagaagatggcagacagtatgttatcaaggaaattaacatctcaagaatgtccagtaaagaaagagaagaatcaaggagagaagttgcagtattggcaaacatgaagcatccaaatattgtccagtatagagaatcatttgaag

SEQ ID NO: 1270 - DNA, 283 bp, Homo sapiens
  full length sequence of bloodCirc_08802
ttttaaaggacaccttggaaaaaaagggggtattagggcatttaaaagcaaggatccgagctgaagttttcaatgccctagatgatgaccgtgaaccccgaccatcattgtctcatgaaaaccttctaattaatgaattaattcgagagtatttagaattcaacaaatataagtatacagcatctgtcctcatagcagaatctggtcaacctgtagttccgttggacagacagtttctcatccatgaactaaatgcatttgaagaatcaaaggataatacaat

SEQ ID NO: 1271 - DNA, 31530 bp, Homo sapiens
  full length sequence of bloodCirc_05515
gcttctaaccctcctttatgtgactcagagaaaggagacctcattccaagttccaggattaattctggtaagtctaagtgaaacatagtaattccttttctttgctggcagcaggtttaaggatgggcagatcacaatctcaaaatatttttgtcatcttgcttccagcctgttggtgaagctaaatataggaggccagagccaagggaattagaatttctgaagctctgacttgcagtatttaaagactgctctaccttgggccttcttgttatgtgagatactagttatacatctccttattgatttaaccagttttattttggaattttctgttacttccagatgaaagtattctgtctcatgcatctaatactttacttgtgaatgaagattcattatgaggtaggtttttggcgattaaatggttgtgactggaacagggaagactattaatagattggaaactaggagaatcttttatgagatttttaactgggtgaataacaaagtcgtggttcatatccttgtagctccacctcgtttcttttcccagtgacgtcttaaattctgtggattctatttgttccttatcctctttgacctctatgacatatgttagatctgtctatatctttctgtatttctggtcataccttttaaattttatttactgacctattttcctctgcttatctcttgaatagtaatggttttctgtggttttattcttggcctacttagaaatataaacattattatttagaacagttttatctttatagaaaattatgacaataatatagagagttctcagaaacctcataccttttattaacattttacattattgtacatttgtttaaatgaatggccaatatttatacataattattaactaaagtccattctgtattaatattccctttatttttatctactgccctttttctgttccaggttactgtctaggttatcatacatttagtggtcatatctccttaggctgctcttggctgtgacagtttcttaaactttacttgtttttgatgaccttcacagttttaaggagtattggtcagacatttcctggctgtggtggtttcttaaactttacttggttttgatgaccttgacagttttgaggagtattggtcagacattttgtaggttattcctcagctgagattgatatgatgtttttcctcatgattagactggggttagggtttttaggaggaagagcatagaggtgaagtgccatttttatcacattgtatcaagggtacttactatcaacttatcattgttaagctgtgacttattgtgacttatcattgttgatgtttactttgatcatttggctaaggtggtttttattaggcttcttcactggaaagttattctttttctcttattctgtattgtactctttgcaacaaagtcactatgtgcagaccacacttgatggggagttattttccaccttcttgatagtgaagtagctacatagatttttttggaattcttctgcatggatgatgaccatggatatttattttctacttggcttggccagttttaaaattgttgatgtatgttggtgatttctaaatatgtttatcctagcgattctttctacctctttttttgaactctttctctttctagtcaacttcctattagaccttttccttttggtctttcttttattgaaacctcgaactcaaatgtgtccatattgtctaagcccaaactaattattctacacctcatctacttcattttatgcctttttgtacccaaacttgctttttcttcccacttactgaaggtagaaaccgatgggatcctttagttttccttttccttattcacactcccttattacctcttactttggattattagtttattgcatagatttccctcaaactagcctattctactttcacactgttatctacattgccttatagccatttttttctattatgcatgtcacttattcaaaatacatcttatttctgttttcagaattcttcaatgagttctgtgtttgcctctaactgattttaggtaaattacttgatctcactatagcattgttttcttattgaaaaagaggaggtgatatagaaattttctaaggattaaaagtgatagcgtgtctaaagagtttaggagtgtgtctggaacaaagtagtacactctaaaagacagttatttttattgttctttgcctccttccaaactccttatcatgacttttcataattttgcttctagccacctatctagtaacttcatttgtagttattctcccaccataggtaccttatcattcaacaattccgcattatttgtggtatttttggtttgccatactatgtgctttataaacctgtccttttggctatgtctttgccaggaatgtgcttatcttttttgacgaacaggaaaactggcttttacttattcatagtatttaacttagatatcctcacccatgaagagtaaattactatctttctcagttgttgcatagatatattgtgtactatatatacgtttgcaagtctgtctttctattaaactgtgatatccaaggacataaggacttaatttaattcattgtatgattcctagcacttagtattttcactctgttaacatttgttgcatagattacctcacgaatacagaattcttatcgatggtaaccaggcttctgcttgaacccttctaatagtgggaaatttatagttggagagccagtgattacttgtggacagacctaaattttagaaagttattttcatacaggtttgaaatctgcctacctttaactttcatttgtctgttctctggacccataaagagttagtctctgcattcagcattttcaagtatttgggtaccaagtatgtgttaagcacatttcagaagtctcttggttggaaatgaaagaaagctgaaacatgttaggttaaaagaaataaatttgctctttaactttgattgtctccagactttttgattgttcacctctaccaagaatacatttttgaggatacatcctcagtgtgggtatatttatctgtacattttgtacatatatgattataacaatacattatgtacattataaaacacagagtatggcacttttcaaaggatagtacaacataaaagtatcttattttatgtattgtagtcttttcttcttacattctggtggattgtcttacacatccctcttctcagggaggtgtatacataccattttaaaggccacctatatatgtaatcaaactgtattatgggcagtgttggagctggtcttagagatgactgtagatagctctgggggttctacttttttcattgctgctgctgctttttttttttttaaatggctttactctttcagactggcttctttctggagctaggatcatggctgctgctggctttgggctaatttcttcatagcttttattgatttattcaacaaattatgaatggagtgcatatcctgagccagatactattctaggtgttagaaatacagcagagagcataaaaaagaagaatattaaagtggtaagtgctatgcagagaattaaaatagagtgatgtgacagtaattaagtgactactttaggaaagcctttgtctagaagagacattaaagctgagatacgaatcagaagaaatagctagccatgtaaacatcaggaggaagagcattccagggactggctaaggcaagatttctaaaatgggactgaacttttgcatgtttgaggaagtaagagaaggcagttgagtttagaacttagtagaaaaggagagttttgtgatcagagagaaacagagcttttcttcttccatctctagttggaaacatcccagggaaggactctgatggatccagcttgagtcagtttcctatccctaagactgattattaatgatggggacatattttggtttttttagctcacgttggactaattgtctgtgtttgtggctagaagaaggtttggaggaagggttttgggttgacaaaattaagagatgctacttattatggaccttgtgagccaagagcttttcattatatcagctaagagttctgtcttaccctatttgaagatacctgttctttatctttgttgactttttatcaaggctaaacttttcattattcattcttctcagaaatgattctttaaccacaagtattactttaacattgcattgtacttctgagggtgagagatggaaagagaagatggaaatctcagtgtattttgggaatatatcctttccattcccttaatgtccatttatgtataaaggatatgtgtaatctggggtcattctgtacttcattgcctaaggcagggaaattggccaatgtatttttgatagtgcttcttaaattaagttgaaaactcaatcctccatatattctgggtaagcaagttttggggggcatatttttgcttcttggcttttggtagtattaaaagctttgataactttggtagtgatgtttgcatggtttgaattatgtgcagcagtgagtggacataatattaaatagtggtatttactagtaggagcaaaactgagtactaaatttcaatgtttctgaaatggtgtggttgcaataggtcaatagctacatgcatatttcttgaagtcactggaaataggtgcctacacagaagcatgaggctaatttctacaaataattgaatatgagatatactgttattaaactgtaataattatgtatttgattttttttaaagaaattatgctttttgttttttggagacagggtctgggtctatcacccaggctggagtgcagtggtgtgatcatggctcactgcagcctccaccttctggactcaagtgatcctcctgcaacagcatccaagtaactgggactacaggtgtgtactaccaggcccagctacattttgtatttttttgtagtgatggggtttcaccatattgcccaggctggtctcgaactcctggactcaagtgatctgcctgcctccacatcccaaagtgctgggattataggcatgagccactgtacctggcctttatgccattatttaatttacagtgttcaagctaggttagcttttacattataaagccagatctcttacattagagtatcaaggtgagccttctgtgtttgagtgtttaatttagatgtgaaatgtttgataggacactatactagaggctctaagaaatagagctctgtggtgaatttcttttctttactattacagatttctaatgatacttttctatgttgtaattttgggtttgtacatgtgggttgtgagaaataaactggaaatcctgtctctgtgggttggaatctggtgtggcttcaaaaggcaaacaaaatattctagcatttacatgccaggtaaattttttaaatggactttccataggttccaaacttctggggccaaataatataaagtaatattgtagttgcagacagacttctgttggcatacatttggtttcttaatttatgatgggacatcaatagctgattaagcaaacaactaaagaaatatctttgtacatccttagtacagcttgttcctgttcatttgtgacaagttgtttgggaaagagttttgagatggcatgctaagacttgatttcctaaaagtctagtgggttttctttgtattttaaaagtgaagagtgtatttcaggattgagaattttctgctttttataaaagactttataattgggtaattttagatttttaactgtacttaaatgaagatgcacatgtttttaccccctcctttcttctattaataatttattagataattttaagaaaggaatattgtagtattatggtggccagatttagaaaggtctaggtgaatttactgtctttcagttcactttattcttgtttatatgagtggctggagatatcacatataatttgaagtttacatctggttttatgttaagtgaatctgattcaggcacagctatcttcaatggtgattttcccagctgtaaattaggaacttggcattgaacactatgtggttttgtgtaagcagaatttagattgtgatattttctgtcgcttcataattctaattttagactttcaaagtaggataattcactccagaaagtctgaaatctgtgattttccatacactgccaggtacattgatgtcagtggtttgaatcaaactgaatatcctttataaaaaatatggtggatcattttatatatctacctgtagaattgtgaccatgggttttctgtttttttatttataaaaatgtaggagattctttttatttgcatttgaaaatttcttggaaacacataatacagtgatatttatggaattttcctgcagtggtagtaaatgtgaagagtgagggataagtttagagcacaagcctcttactggtcttttgctttacttaaaaattttttttttcacttttctaattacttgtctgaattgcacagggtttcagtttgaatattgcaggtaccatgaagtcttttcttgtagctattatgtacttgtgtgatgccatcaactagattataagtgccttgagcataggggttactataaattcatctttgtattctattgtacttagcttctcacataacaactaatataggataagtataatgagtttgttgaattaaattagattgatctgaattagaggggaggaattagacaatagaaaaacagggatgaacttagagaagctaagttttgtggtcatttgagataccttgttaatttagttttaagtaatcaagagtggtgatgttttattcatctttaaaactgttatgactgaacggtcagaaatgatggtatgtcttgttctgttaccaactagcaatttatgtttcagtaaactgctctatgtgataattcttgtgttaaaaataccattactcaaaaattagctgggcgtgttggtgcatgcctgtaatcccagctactcagaaggctgaggcaggagaatcacttgaacccaggaggcagaggttgcagtgagctgagattgcactccagcctgggcaacagagcaagactctatctccaaaaaaaaaaaaaaaaaaatatcattactggtttttgtttcaggggatacatctcatgaattaactgatttcctaagtcttttttttccccaaccctccattaaaaaaattaatgtgtaatttacatatatcacaaaatgtacagatagagggtgtatcgtgtgctgagttctgataaatatatacctgtgtaacaatactccagtcaagatacaaacatttcgatctcctcagagaattccctcattccccttgtagtctatctttctccataccattctcccccaacccctggtgtctactcttctgatttctgttacatatattagttttgcctattcttgaacttcatatagatgaaattttataacatgtattctctattactggcttaatttatccaacatgtttttgatatttattatatttgtgaagcctttttgaatagtgtagtgaaaaatgttagagaacatctccttgttattggtgagaaaatttctgtgaatgttaatatttaattcagagattaaagaagaatctatgtaaagtgacaatacctacaatatccttttttgacccaaataggaagtagttcttttgatactttgaatattgaatattggaatagctttgtgaatacaaggtccagtttaatctggaaattaaaatcttcatttatttattttgttagcataagtcaattttgtcctaattattgaaccctgacttctctgagaagatcatctttcaggtttgggaggaagaaactctattcttacttagtttttaaactcacattttttttttcgtattgttagataaggttatatagacatgagcctctgttactttaacagtgcttttgaaacagctaacagttcattctgggatataagtcaaatatgtattgcttaactcttggtatcatctttattttttcaaaattgtaaaataccggtaaaattgatcatctttaccattttaaagtgtacagttcagtggcattaagtaaattacattgttgtgctgccatcactatcatgcatccacagaactcatcttgcaaaatggaaacttcatcattatttcttaatttaaaaagcatttttcaaaaagggattataatattagctcctttatccatttaaattggtcccataattaagtttataaaaatatttttggctaaaatggatagtcatgaaaatgatatgtacatgctttataacatatttgtagtgtagccttttggtattagacccaaatcttttctatgaacacaggtctccttattggaatttattgtaaatttttcttaaatcacacctttaaatatcctctttaatttctaagtgtagtgagacagttgcaaaatagtctcagtggagattgtcctaaatttttatagtcttgtacttgacagaatttttttaaaaagcaagtggtccttatcaaactgttacaaatagtcaactttttcatggaaacaactacttctgctgctatcttacagatttttaaagatatttagtgaaattatacattaatagacataacccagataaaaatgtttggaaacaaaaataactgtttcttgatagtatacagttcagctaatgggagcatgagtgctaggtcttgtcttattaaccactaccccttccttcacactgtgagaatcaaaggtaatggagagcattggttaacatcatgacacatgaatttgttatgtggcagataatgcaaagaacttgtagcatggatagtaagttgataatttgaaagttttttttttttttaaagtttcagtatcttacagctaccaattgtcagtcttcttttctattgttataaatagggagtttgttcatactgtaaaataaaattacagtttttgtttgttatttattgctgtttaacaagctaccccaaacttagcagcttaaacaactgtgtcaatttgctcatgattttgtgagtcaggaatttgagaatgattttgctggtctttgcataactggcagagtgcaagtttgattaggtgttttctgtcttcatgtgctctctccacatggctagtttgggcttctttacagcatggtagtctcagcatagtcaaatttcttatatggagggtcgttttctccagagttaagtattcataagacaggaagtggaaggtgcctatttcttaaggcctgggcccagaaaatggcacatatctcacccatgctactggtcaaagataccacaaagctcacccacattcaaggggaggagacatagactgcttctctgtagaaggcacaccaaataatttgtggccttttaaaatctgccaaaggtttaaatggtgtatataattaatggcattcttatttttaaaatcctgagaatatttctggtggatgtcaatgttaaagactatggaggaacacataggtctacatttaactgattcaaattataaatgagtatgaaacaactagagagagtaaaactgacaaaggatagaatgctgggcacaacttcattataataaggactactgtaaagtttctatttattaatccaactcttgttctcccaccattaggtttcagttaatgccgcatagcattaaaaaaaaaaaaagacgaggaaaatgaagctcagtaatgtgtatagatgaatttgagttacaatcttctggcatgctgcaaatcccatttggattcctggtaacagacattttagactacagtatgagataattttgttgagtggactaggtctgagtatcatgtttgagaaggcagcatttaaaatgaatttgacatttataagtatttttttttttggtacttaagctgtgcgtagtgttatttttgtgtatgaggaggtaaattttaccttggattgttaaatatagtgtcttatatcatctgtaatcataaaggacagattttctcagtaacattttgtcagtgacacaatttttcatgaccagtgaatgctagctgaagaaactgaaaattttctgaaattgtcagtataaatcatttatttcagtagaccttgctatgctttgctgttggaagtaaatataacttttcctaagattagtcaaaattcactgagtttgtgtcatgctttgttagatgctgagaatagatcaaagtttgatctctatattttatttaattgatatcaaatgaacataattaatgatgatgttgaattttttttaatacaagtatgaaaatgccctttctctttgtgattgtttggtactagtcattaactttgttcccattttgtataaatattatgtattagaagttagaggcagttttctgtgaagagtatttctacttgattttatgttatttgataaatagatgttttgaatagcagcataaaattaaatgtataaatttaatattattgctgtattgtaatctttttctgtttaattttttggcttgcattattttagtcgagtaaagtattttgtatctgttatttttatggtaatatatcttttcttcatataaaataaaatttgagacctctgcatccaaaatactaaatataaaagtttataaattatattaaaatatgtctcagattatatagagtgatgcgtagtcattgttaccttcaaattagccacttggtgaaatatgtcactttttagtcgctagactatgtttgaaagctgtaaaatactggcgagccacaatttaggaccacgtaaaatgtgaaaatcgggtttatggaaacagattagaatttattttcattatggaatgttttgtttcaaagtttgttgaaaaaatatattttgatgtataataaaggtatatagtatgatgtttgtgagattatttttcaatagtttaaaaatacttttttattttatgtaacaatataatggtacatttcaagtaaagaatttgttcaaatctctatctcccttacaaagctaatgattttatgtccccctttaatctgttttatttgaatatagtagggactctttttagagacttcttttatagaaaattgtaggtagaagtgtatacaagtaaggtagtgtatgctaatgaaaatggaaaatagatcactaaaattttgtttgtgtatctcatattatattgtaagtgatttaattattttctttgattttcatgcaactctaaatatatccctcactaatagttatgtttaatttctcccatccatttatgttaatacatacatacatgtgtattacacatacacacacacacacacacacacacacacacattttttaaaaaaagttgttgtaggcagaataatgtccttcaaagatattaggtcttaggaacctgtaagtgttaccttgtgtggaaaagggtttttgaagatatggttaagttaagggtcttgagatggagagattattctagattatctgtgcgggtcctaaatactatcacaagtgtcctcataagagataaacagaggcataatctacagacatacagcagagaagacagtgtgaagatagagtagaaagagatttgaagatactagccttgaacattagagtgatgaggctacaaaccaaggaataccagcagctatcagaagctggaacaggcagggcatggattctcccctagagcctccagagggagccagccttcccaactctttgatttcagcccagtttgaacttctggcctccagaattgtgagagaataaatatctgttgttttcagccaccaagttttggtaatttgtgacagcagccacaggaaactattatgtgtgaatatacatttttgaaatcactgaaatatttaatcatagaataggaagggatccccgtcttaattgaccggctcctctcttcctttgacttgaacatattcacatgtggacttctctactctttttactattattacatccttatacattgggtcacagctttaatatcagctccacagatgagccctcttttactaattaattcttaattttttccctatatcaatcccttttttgttttctgtatcattcatcatgtacattcttggggcgaggaaaatcttaacccccattgtaagtctacaacctataaagaaagatatatttgtatgaaacttaacacatgaatggaaagatataccacacaaacaattggtaaaaatatgtacagtgcagagaaaggacagagttgatatctgttctatataataacttcttagataatgacaaaaaggaaacaaacagcactatatgaaaatgagcaaaagatatgaagaagccagtccaaatggccaacaacatattaaaagatgttctaacttactagtgtgatatataaccttgtatctatcatactgcctccttcagcccccacctttaatgaaaagaaagagaaagagagaaaagaaccagcaataacattgtattggcaagaacctaaggaaagaattagtttttatattttgctggtagaaatgtgagttactagagcctttgtagacagtgatctgataatatctattaaaattaaaaaaatatatttataccagttgaccgtgcagtcttactctttgaaatctagctcatagaaacacacttccatatataagcatttctgtatgagcatttgtttctagtggcaaaaactggaaatgcaatttatgtctatcagtaggggaattgtgaatgtatttattatgtatctacataatatatctacataatagaatcttagtagtcattaaaaagaatgaatcagatatgcaccagtaaacttggtgggatttgcatggggaattattacatgagaacaactaagataattaaaaatgtgtgtggcagccaggcacagtggctcatgcctgtaatcccagcactttgggaggtcaagatgggcagatcacctgaggtcagaagttcgagatcatcctggccaaaatggtgaaaccccatctctacaaaagtacaaagattagctgggcatgatggtgggtatctgtaatcccagctactcgggaaggctggggtgggagaattgcttgaacccaggaggcggaggttgcagtgagctgagatcacaccattgcactccagcctgggtgacagagcgagactctgtctcggaaaaaaaaaaaaaatatatgtggcatcttaaattaaaaaatgtagtgataacaccattatatatgtagacatatatatgagaatacatatttttatatgtatgagaatagaggtatatagtagatggttaacttggaccattttaatgggcaaatggatggagctgtcatgttgtgggagggaagttggagagggtatttgaggtagggaaacatgactactaatttatgctttaaagttaaaattaacatttatgtgtttatgtataaagattttttaaaaattgcatgtgatggcattaattagtatagctcctgtggaaagtgatgcagtaaaccctgtcaagcagtgttcatactctttgagctaatcattctatatctgggagttcatattaaggtattaaattaaaagaagaaaaatgttaatgtgtgaagtcatcattgtgctattaactatgtaatatggaatattatatgctaggaaatataataaagtgtatccaacataaactcatgctgaaacttcctctttttggactttacatccagaaaaattgttgtcatattgatgggatgtaacacacaggtaaataatacaattatgaagggtacaatgataaaggctgttacttagaactatagactatataataaatgaaaaagaacttataattgcatgtagaattaaaatatatatgtatttatttgagtactagaaggagataagataaaatgaaaacagtgtggggggattatagtaaattgtttttatcttgttttgacaaatctggagaacagtgttgctcaaatattagcaaaatttagaagaaacactaaaatttaatatccagctcttgtaactgtggaatatattttctttataataaaacaattttgtaattttgcataggcattggcagaatgtttaaatttggaatcagattggtatttctgtcaatacttactctgaaagctgcagtgtcatcatgagttattaaagataaatctttggtttcatgtgccatatttcttactaggagtaaaactaggtctaagtccattttacgctttctaatagtttccttttatctgttgattccctcttatgcatgttttctaccgttttcactgtattcttgtattaatcacagtttttaaaaagtttttgtcttaatgctttaacgaatagattatctcttggtctagttttattgattacttcttgacttttttttcctttttgtttatctcacaatttttgtcacccactgtaaaaaactgagataaattatatttattctctgaaatgggaacacctattcttctgtcaggtcattggtttgtgtttctaaaatatactaaactaatgtgttatgaagctaaggcagataggtgataaatttgtaaagcaattgaaggaaaaactcagtaagtcaaaacacattttaaaagagacacgtttaaagttttttttatataaatggaatcgtgcattatgtgaccttttgggattggcttttttttttcactcagtgtaatacctttgaaatctctccaacttgcatgtatcggtagttctttcctttttatagctgataagtattacagtggtagagatgtggcacagtttgtttaaccattcacctattttaggacattttggttgtttccagtttttggctattacaaacaaagctatgaacaatcatgtactgatttttgtgtggacataagttttcattttcctgggataaatacctaggagtacaattgcttgcccttataggaggtatatatttaattcttaaagaaactgaacaactgttttcccaagtgatcatactgttttacattcccaccagaaaaagtggatctttcaaaccacaaatgtttgaaagagccactttctccacatccttgccagcatttggtattgtcattactttttatttttgctagtctggtaggtatgtggtggtgtctcattgtggccttaatttccatttctctaaagattggtgatgtttaacatctttttatttgcttagttgctatcccctttgtatatcttctttggtgaatgtctctatcttttgtctattgaaaagaacatgctttcttttcatatgtgcatggaaccttcaccagaataaaccatatccttggtcataaaacaaatttcagtaaattgagaagcatttcctgttcttttttcctgaaaaagtttgtgtagaatttgtgtactatctactgactcctggtatttgtctggtttcagagggtgggagggttttctgcctttcccccaagtggcagcttgcagttttgctttgtatgaagaatagttctaggatatgagtagctaatcatttccttcattcctgtaccataagaaaaactctctcaggtaatctaatctgtcctcatctttctctagagttctcgatgcgcatttgggttgtttgtggggtttactattgcaaacagtgttaccatgaatattcttgtgcaagacttttggtatccgtgtgtgagagtttctctagggcatgttactagaagaggaatttctcaaagtatacctgtgttcttgcggggcgtggtggctcacacctgtaatcccagcacttgggaggctgaggcaggcagatcacctgaggtcaggagttcaaaatcagcctggccaacatggcaaaaccctgtctctactaaaattacaaaaattagctgagtgtggtggtgggcacctgtaatcccagctacttgggaggttgaggcaggagaattgctggaatccaggaggcggaggttgcagtgtgctgatatagcgccattacactccagcgtgggcgacagaccgagactccttctcaaaaaaaaaaaaaaaaaaaaacgaaacaaaaaaaactcatattaggactgatcaccttgttatcatataaagttgttataatatactgtcatattaaatatactgtcatatttttcttctaattttgtcttgaggtctctcaagtggctgtaaactctagccctgccctgagggggtgccaggggatttggtcatatgatgcttataatgggcctttcacaggatacttctttatccctgtggacagcctaagtgtttgacatgtgacccagatgtccttctcattacaaacaaagaagcttgtttatactggcaggtgcccttttggcgcttgcctgacttgtgtccagtttattcttaacaagttagctattctgtaggagagccctgaccaggaaaggagttagatttagatgtgttggtcaggtgagacacagaggaggcagcacaaccaaacataggaaataacagaagcagtatattacttacggatcccacagaaaagagggcagcatgtttctcagggccagatgggaaaggggaagccatctgggacttggaggctccaccagtgggtggggagagagagagagagaaagagagggagagagcaaggaacctgtgagtcaaagccattattggggtctaggttgttatcaaagagtttccctgcagggaattctaactgtgggtgacgtggtttggatctgtgttctcacccaaatctcaggtcaaattgtaatccccagtgctggaggtagggcctggtgggaggtgcttggatcatggggacagttcctcacgaatggtttagcaccatcccctctgtgtggtgctgttcttgtgataaggagtgaagttatcctgagatctggtttaaaagtgtgtagcgcctgcccccctcttgctcctacttctgacatgtaagaggtgtctgcttcccctctgccttctgtcatgattgaaagtttcctgaggcttccccagaaggcaagcagatgccaacattgtttcctgtacaatcctgtacaacctgcagaaccgtgggccaattaaaccccatttctttataaattactcaggctcaggtatttctttaaagcaatgtgagaacggactaatacagtgggtttacagcaaacagacttcatttccttggtcacgctgtgactgagagatggtcactgcagcttatctgggcagtccgtgcagggtatgggagtcagtagggtgagtcaagtaggttgtatccagctgtcccatagggaagtggttactgggaggcgatcgtataaggtagatatctggaacaacaacatagaggaactgggtggaggcagacaactggaaactgtgtcgagtgtgactaagcccagtttctgatatgagaaagttaaacatgtttaaaatgtatgccaaggcaacataaaattattagaattcactacattcaccaaaaatatataacatcaaacaggtagcaaaatttgatagattggtatacgtaaattagtacctctcctattaaagtgggaaattttaaattaacatttgtggttattggtagataaaaaagtcagcaaagggtatacaatatatgaagaatacagttcatggacatatacagaattcaatatataaagaatgaaaaagagatatataacataaatcagagattaaaaggaaaatgagaatactgttaattatatgtgacctatgtaaaaatagacatttctaggaaaatattacttgtaaaaaccgagggagaaattaaaagtctgaatcttcccacaaagaaagcaacaagcccaagtgatttgccaataaataagtctctaccaaaattttgaggaatagattattccaatctgttgcaatcttttaaaattaatacaaacagaggataattccccagcaagttctgaaagcccagcataatcctgacatccaaatcaaatgaagacaccaaaacagatgacaattacagatgtatttcacttttaatatagagctggtaatcccaaacaggacagtagcaaattgaaaccaacatttaaagaagacaaacatcattgccaaattggatttttcccaggtatgcaaggatgatttactaataaatgatccataaatgtaagcaacatttacattgatagattaaaagtgaaaaactgtataattaaaatagatacagaaaatcatttgataatcagcataaattcatgataagaatgcttagcaaattaagaaaagagggaacatctctaaactgtcaagaaatatttaaaaaacaaccagtcaaccaaccatcatcagcaatcttcctaaatggggatagatgaaaagattctcttaaagtcagaaatgataaaagcatgcttatcacatgttctgattattattgctgtataacaaatccaaatttaatggcacaaaacagctgttttattatgcttatgaattctgagggtcagaaacttggacaatgtagaagaaggcttttttttttttttttttttttttttttttttacagctctactcttttcagtgcctcagttgggatgatgtgaacgttgaacactggaggtgacttgctggctaggggctggattcatcttaaagtatcttcatttatatgtctggtgatatgatgctggctgttggctgggaacttaattaggcagtcagttggaaaacttacatacggcttttccatgtgatatctcagtgtgggccagtttggtctgtctcacataatggcatctaggctccaagagcaagcaatacaagagcaaaagacagaagcacattgcagtgagctgagattgcgccattgcactccagcatgggcaacaagagggaaactctgtctcaaaaaaaaaaaagaaataagagtttactaaagttgagtaggtagattaatatagaagtcaattggattgttattatagtaacaacaaataactagaaagtataaaagaagacattgaaatagtatcatagatactatcataggtgcattcctatttattgaatgcacctaacaagaaatttttgagacatctttaggggtatttatagaatgttatcagtagtccttttagaaaaaacttaaccatggtatatcttagttgtagggctcactcactatcataaagattccttttctgctgaaataatcttatagctagaaacagacccacagtgtttatgggtctgtttatactagaataaatttggtgtatgataaagatggcttatcagattagcaaggaaagaagttattgtataataaatgtaatcaggaaaaatgatccatatcaggaaaaaaaaagaattagatctctgcttctaccatataaatactcaaatacagatggctgaaatacttaaatgtcaaaaataaaatttccttgtagtaaataaaggtatataccttttatagatggcaaaggatttaaaaaataagactaagcaactgataaattgttattaaagaatagattaagaatttctgttcatcaaaagctgccttaaataaagtggaaacacatgttataaactagaagatgtttgcaatatacacagctgacaaatgattaatatcaagaattattttaaaaaatttatccaattaaaaacacaacacagtcaaaaaataaagatgtgaataggcatttcacaaaggaggaaccacatatcattgataatcatatgaagaaattttaacttcattaatgatcagggaagtcaaattaagtacaaaatgagatgccatttaaaaccaagtgtcaggaaggatgaagatttatgggacctctgtattcatgccaccattttggaaagtactttttcattttcctgtgaaactaaacatagacaaatgttacaacccaattattttactcataggcatatactcaagggaagttctgtgtataaacaaaagtagatgtattgaaaaatgttcacagcatttctggtctcaataacaaaatcctgtaaactacccagatgtctcttgataggaaagtggctgaataaactttggcatataattaatatagcagccaaaagaatgaataatagccataataatattagcaacataatatcataagaaaaagttaggtcccccaaattgacatactgcaggataccctttaaaaatagttcagataaaagtaatatgctttttggtagtaaatatagaagagatgaaacatcattcatttgaaagtaagggaatgatgaaaaaataaattaaggattgtgagtccagataagcacagggaagagttatatgtattacaacttactgtcagggtcttcaggtttatgttgtcaacactgattttaccgtgattactatgtgacacttttctctattatttgttgtatagagcacattcttgtgccttgatattgtgatatatttgtagacttttttttacaggacctatttttacttttaatcattagtaccaatgcaaatcacaattttgtcatcatgcttattttgcttatatgggggactccaaagatcatatcccatagaggcatggatttggcattcttgttttgaaagatttggagttgagattgacatgatagttttagggtctaaaacatgattgttttagaaatagttatacagtataatgaaaggattggagagcagaatgacaagaagtaagttctggtagttttcaagaaatagtgatagagatccaagccacaaagatggtcactagaggagacaagaaaggatgagtggggaaataatatagaattaactgacttacctgctgtggtgtaaagtgtcaagtgaaaagtaaaaggtgacacctgggttttgcatcctggatggattaaagaaggataatactattgactgaaaagaacagattgaggagagaaagtagtttgtgaagaaaaggtgaatttggctatagtaatagtgtagtttcatatatttagagtatcttagagtgtaataccttagaagtcctctgatcagcctgttcatttgacatatgaggacactgtggcccagagaaagcgtagtgatttggccagcatcatatggttcaaacacaaatttctgtgtgattacaggatatggatctgatggagatgaggatgatagaagcaactaggttacaaaggtccattaattcttgttaggaatttttactttgggctgggcgtggtggctcacgcctgtaatcccagcactttgggaggccgaggccggtggatcatgaggtcaggagattgagaccatcctggctaacatggtgaaaccccgcctctactaaaaatacaaaaaattagctgggcatggtggagggcgcctgtagtctcagctacttgggaggctaagccaggagaatggcgtgaacccgggaggcggagcttgcagttagccgagaccgggccactgcactccagcctgggtgagagaccaagactccgtctcaaaaaaaaaaaaaaaaaagaatttttactttgtaaaataatgagaagccattgaataaggttttaagtaggaggagtatttagaaggaacacttaggttgcagagtggagaatggactagaaaggagcaaaattggaagcagagtactgttttggagtttgatgctataaactagatgaaagataatggtgaccttgcttagggtgaaagtattggggattgagaggagtagatgtattctggaggtatctgggacagcggtcccgaaccttgttggcaccagggactggttttgtggaagacaatttttctatgaactggaacgttgggagatggttttgggatgaaattgttccacctcggatcatcaggcattagttagattctcctaaggagcacacagcctagatccctcatatgcacagttcacaatagggttcgtgctcctttgagaatctaatgctgctgctaatctgacaggaggcagagctcaggtggtaatgcttacttgctggccactcacctcctgctgtgcagcctggttcctaacaggccaaggacccagaccggttcgtgtccgcgggttggggacccctgctctcggagataggattttgtgattgattttatatatggggtgagagagagaagtatgaggcaaagatgactgcaagttttcttcttgaccaaatgtgttatagaggtagtggcaatcactggtctaaagacccctggaagaagggtaaatttgaggttggtgggggagatgttgaattcaatcttgagttttggttgtattgcatttgaggttcctgttagattacagttgtctcttggctatgtagatctggagctcaggaaacacatctaaattagagatagagataccatagcttatgtttgtaaatgaatccaaagatgtgaatgagatagtccagggagtgtatctaaagtgaaagaaaggaagggttaggttggagccctttggagcaccaaaatttaaaggataggtagaagaacctgcaagagagattgagctaaagcagttagaaaactaggaagaaggaaggagtatgatagtcttatatagcatgaagtgagaagtgttttgagaagaaaagactaatcaaatgatgttaatgttcaaataagacaaggaattgtttcattttgcataataaaaaggatgtaattggttgcaggcatgagatataacaatagtgtctgaagttgagctgtgaaaaggataggactgtggttggaggacactgtatttgaggaaggttttgtttttgtttttgttctgttttcatttttaaactgtagggcttggagcatgtttcattgttgatgagaaagagctaaataagaggaggttgaatagttaagaggaaacaattgagagagccaagtctctgagagcccaggttgctgggagggtttgggggttagtcttaagtaggcagaagggttcctttttctttgtgagcagaatgagttgtaatagctgagtacagatgctggtagctatagttttggtaacaagaagttgagggacttctcttaaaatgccttctgttttctttgttaagcaggaggccaggctatttgctttgatagcagaaaggaatagaaaggctggaagtttgaggagagttggcagtctttgaaatagcttttctggagaatgagagaaataactttaaagaaatactgggtgtgttgggcagcactgtgaatccagttgaagaggggaaacatgaattttatgtgattttgttctgatagttgtcagcagaagacaggtaattggatattattggtggttcctggggtgggagggaggtgttatcagttgccttgcaaccactctggattctgaatcagctgaggaatggaaccaagagttgtatagaaatcagagtagcaactttattgttaaaacctggcttgggcctaaatctgaaatgaggtctcccacaggttttcttctaaattaaatttacccatctggtcacaggcagaatagctaaaaaacaagtctctgtgcttaaagaatgaagtttttccctgatgagcttctttatgggagctaaactgcaagaatagtatattgtttgaaggcaccaagttcccagtaaggagctcaaagaggttgtactttgcatgcacactaaattttataattaatcttagctaacagtgacacttagggatgttttgctctcactatgattacttttttttttttttgagagcagtaaagaggataaaggactacagtacttcttcaatcacatttccttctattgaaaacaggcctgtgctctcttttaaaatgtgaggagaggaagtagtatatcttacctttagcattcattgagcgatgagattttgccagataagaatacagttcatacagtgagaattttgagttgatagagggatagccctgtaaaaatgttcattttttggttgggaatgtatgactggcccctgagaagtgattagttctgcaaaatctgtgtagactactaagattatgagagggcatacattttttgaaggagaagataatgagatagaatcagagggctatcagcctgggaaaagattgctattaaggagttggaagttgaagacttaaccaaagagggtgagggtagatataagggtttggagagtaaatgtcttgtagtttttatttttgttgttactttttgggatgtgtaagttttctgaatgaaggttggtaaagacagacttaattgataacagatgaaaattataaaggaaaatttagttattagtagttgggatgttttcctattggatcatttatgaatataatgttttttaggtaataaatttacacctcagtttgctttctttggacttgtaataatctgccactggccaagtttcactggtagtagaattcatagtatggcaatacttctttaattcagcttcataggcagtttcaaaattattaaccccaataataattggacacttgatgagaatataaagtagcaatgtagtatcttttaagatattggtccttaggcacagtcttaatatgggtagagctgtttcaatgctagcaactgggtcttctagtgcccaagatccactgtaattttcttggaaaagtaagagggaaaaggaagtcatgtgggaactattagcaactaatttgctgtcattcagtcatttattttgaaggcattaattcagaaatattctttgagcccttactatgtgctaggaactgctcagttcaattgctggagggtaaaaaaaagatgaataaagaaaggatccccacactacctccagatttcttatataaacttaggtagacagttacattttcttgacccaataagcctgaaattctgttcttacatattttgactcttctaattagctcagtcttaattgctttctatttttaactttaaggtttgagtgtgtgtgtgtgtgtgtgtgtgtgtgtgtgtgtgtatttcctttgttctgttttctctaatttctgtttgcccagaagagtcagaaaaaaaaccacttgtctctgttgcttctaggaaacatggcattaaacaggatcaaatggaaaagtattattgcgactgtgaggatgttagcaagtagttttccagatcagatggagatttagttgaatgctaagtggacagtgttaactaataggatatttggggacgatcagataatttgggtggtctcttgagattttattttttgaagtcagttatcaaaatgtctttattagacctttttagaaggggaggggtgcaggttggttaggttttgagcaactttggtgtctagagatacaatcttgtatttggtatgaatacttgtaatatgggaagatgttataatggagactattatgaaaaatcctaatttatttgttgagtaaatgcaaatttaaagcatttatgtcttttatggttagttttgtaaagaaaaactttcttgagtttttctcagaatattttgatagaactaataggtagctggctcatcatgccatgttgtttttttgtgctcatagtttaaaattgtaataaggcttgctatgaaatactgctgtcttctgtgtcctccatgcttttccagcctcctcatctccttcatactggtttctctgttttcatttggttagttctctagtcactaattcaactctgaagtttcccctaattgtttaaaattacactcatgatggtaaaacatatgagctagtctatttcatttcttgaatacatgtctcaggagctttctgatttgctccaatctagactggaggtatctcttcttgcttcataggtattgtggaactcagttcactattattctgggagaaatccctttgcttttcactttagttggatctttcctaatcctatgtctttttctttcttgtcttattctcttggtttactccatagcttttaaagaaagtgtgcaataaaaattgttttgagactttacaggtgtgaacatgactttattcttccctcaattatatgttggtttggttgaatatagaattccatgctgtaaatcattttcccccagaattttaaaagcattattagtccattgttttttaccttccagtgatgctgttatgaagtgtgagaccattatgttgttggtcctttgaatgaagcctattttctctctggaagcttgtaggatcttccctttgtctctactgtgccttgctgtgggttttttttcttctttttttctcttggacagttgatatacccattactggatataatatccttttgttttagaaaattttcctgaattattttgttgatgatttctttacttttgttttctcttttctgtctttcttgaactcctagagtcctaataattagatattacgtatcctaggctggatcttgtaacttttttttactctgacttcccatttttttctcttatacttttttaaaagaaaatttccttaattttattttctatccggcagtttttcatttctgcaattatatatttttatttccaaggcctcagtcttgttgtttactcctttcttgatcattttctcccctgaaattagggcatcctgttcgtaattcatggatgaactatcttctgttgttaactttctgaagatactatggttttgtttttttctttcttggatagtctttgtttatttcatcctagttttcttttatggtttggtctctatttttttcttctatttgttttttaattagatgctttcttcatctctttggtcgtccttgatagtctgttcacatgtaagattgaggcactaataaagtagcaaacacttatataatgcttagaatgtatcagatactgttctgagtgcttcatctgttttaacatatttaatccttgtactgactttaggagttagctattataatattcgatagatgaggaaactgaggcacacaatgttttaagtaaaatgcccaatgtaacacagtaagtggcagagctggaatttgaatccagccatcttaactctatagtcccttcttttaacctttatgctgttctgcctgttattaaaattagaagctaattggaaattttgtgcttgtgggtgggatttgtcaaagtagtatttcatgagtgagttgtttctttgtggaacgtctgataaggtccttttcatgggttgagtagattcatcactgaagaatctgcagctcttctgactagaggtttcagcccagccgctgttgttttggttgctgagtagtgaaagatgtctggagttactggtctacatatttaaccaccctctcccctccccaagatataacttcacctagtccacctgtgttgatatcttcctgcctggagaccctcagctttaccctgtccagggaatgaacctccagtcttctgctgtggtgataaattgtaggttacccagttgtgcagattctggcagtggtcttagcatatacctatgactcttaattttgagtttcggttttacttgactttcagtacctcccattgctgagccttttgaggattctcttatgtattcataagtgtgattctcatttttccagtgactcattttccttgtatttgctttgaaatttcttgtagttttctcatttcacattctctttgacctaatttttatgcagaagccaataatcaaaagaaatctttgtattcttacagggatacctttccgtaaagatgaataaaatgtgtgttttgatgtgccatttgacattttctgtcagatctgttgaaatctttctcaaatgtctccttctaccttaggcatttaatgatgcttccaaccagatatatcatcttctgaaaatctttcttcttactttggaaattttttcttctcttttgagactcttttacatcttatgttatttgtatttgaatgcttttcttacactctgccctcctctgtacaccagactgtaacttctttgaggaccttaactgatacagaattgctgaataaaagtttattacattgtgtattctgtatatgttttgtccttttgtatgtctttcttataaaacatttttagaatatcagcagtgtattaaatattcagactagcaaagtagggaattaatacaataaggcaaaaaaagagattaaatttagatataaagaagtttgagaattgttagaccttgatattgtgaaaactttcagcgtagattcctaattataatgaagtatacacctgtctttctgccattacacaaaagaatgaattatgtgatctgttaatgttttggccaggcttatgattctgtaacttagatgtcagatatatttgctgttgctacattcttataatatttgtagtttaatgggctataatgttaaatgctagaatattctaaaatacttgataagaatgcactttagataaagtaaatattttaaatgtattggagtagctaaatacataaataagcccacatttgtatatttccttttaaaaactgttgattttcatattttataaattttatttttacaagtcaatgctgttaattttcttttctcctatttaaaatgctcagaagtaaactattgcaggaattgaagtctaaattatatgcagaaagattattgctttaaaaatatttctctagaattatatgttaagtaacttgggacataatttgtttttttaaacgtattaatatttctttgaaaataaaaggaagagtatcatctgcttttttttttttttttttgatggagtttcactcttgttgcctgggctggagtgcaatggtgcgatctcggctcactgcaacctccacctctcaggttcaagcgattcttctacctcagccccacaagtagctgggattacagtcgtgtgccaccacacctggctaattttttgtatttttagtagaggcagggtttcaccatgttgaccaggctggtcttgaactgctgctgacctcaggtgatccgcctacctcagccttccaaagtgctgggattacaggcgtgagccaccgaatatgtaaaagttgctggagtctggaaaacatcagtggtcactagtatgttcttttgcagagctaaatcagaacttaggaaactgactgtatttggttcattaccacagtcaaacaagctgaaatgattgttagatgtgggtatttgtttttattttcaaattttctgtcaccttacaaatagtttattgggaagtgacttaagaaaacacacagaagcattactctaaaaattccattcttttgaaaccatattatttgagtacagcatatgtagatgctaaaaattttttgtttcttcagattcatgggatacatgtggaagagataaagttggtgtttatagtttgacttggttaattcttgatgttcatatcactcttctttcataatttcttcatgaaaaatgtagccacatacagatttctgttcacttgcaacacagaataatgtgagttccatttcaaactaaacatcatcaaaagtttctgaaagtctggtttatattttttaggtgctatacgtggatgacctgcttagttttaatttttggagaaatacattttataaaacattttcatcagattgctaaaattgtgagtaatggtaatgataccatgattatattctggttaatttaatacctttcctttttacaatatgtttctgtctaaatatatattttttagtgtcattacctactgagtttctgtgaaaagaatttcctttgcctgttaaaacaatcgttgaaattaatgtttttactgtttttttctttgacaattttttgaattttctttttgaaggtgttagcactagtttccagaaggtaaagcacagatatagatgactacttaaagcaaatgaccttagaaaatgcccttaagattaatgtttaacatatagtttaatatgtatagctatttttattttagaagtgggaaaggattgttttcctgtaatgaagtccatcttgtattactgagtcaaggaaactataatcaacatttgggtatgttcacttaaagttttctttttaatttaaaacattgctttttaaattaacttttaggttaaggggtacatgtgcaggtttattacaaagacaaactcctgtcatgggggtttgttgtacagattattttgtcatatggtcacttctgaatgatagaaaaataaaccaattattactgactagagtattacttgcagctatagattcacaattacaggttccaaattgtaaattaagaaacaatctatatgagaacttatttttcattttaatgtatacttcctcttactaatttcaccttttcaggttatttagttcttgcatggtttgtttgataaagctgctgctcctttttttttttttaaagccctgatactaatggttttatcttttcatttttatgatatacatttaggactaaaaaagcaaataatatttgagtgcttgtctctcttacatactttaagagtaaagaaaagaggaattctggatatttatttgtgtttttctcatccctcatctcccatgaatacatgacttgatttatcttgatcagcctagtaacttgctccacatttttccaaaagtgcaaagcagtttcagctaaaaatacacatatcaaaatgatccaaaagttgtggccacagctcaaaaatgctgatcaattttgaaaatctaaatcagccttggccctgaaaccgagggaagaacctttgtggtaggggacagatttccaaaaactcaccacagtcctgttcttagctggagtttgtgctgatgttgccagacaactgaggaatagatgcaaaaagcaggaagcattattgaattgagctctagtgccaatttgggaaaagcaaattaaaatgtaaaagaatatttttccactcctggcatctcaacataaaatggcaaaatacatggttgctgaaaaagttacagaaattgctaattttgccaaaaagtaaaagccaattgcaaattcttttttgcataaaaaatgcatagacagttagaaattctaatttacaaataaatatgtatacatttaagttggagagtattttgacataaatgactgtgtgtgtgcgggcttgtttcaatatcttatatttttcaggtgccacttgaagaatggatgatgatgattttggtggttttgaggctgcggagacttttgatggtggaagtggtgaaacccaaacaacatctcctgctattccttgggctgcctttcctgcag

SEQ ID NO: 1272 - DNA, 551 bp, Homo sapiens
  full length sequence of bloodCirc_00483
gcaacagaacattgaggaaaacatgacaatagctatggaagaggctccggaaagttttggccaagtagtgatgctttatattaactgcaaagtgaatggacatcctgtgaaagcctttgttgactcaggtgcccagatgactatcatgagccaagcttgtgcagaaaggtgtaacataatgagactggtggaccgtcggtgggcagggattgccaaaggagtgggcacccagaagattattggaagggtacatctagctcaggttcagattgaaggagattttttgccatgttccttctctatacttgaggaacagcccatggacatgcttctgggactggacatgcttaaacggcaccagtgttccatcgacctgaagaaaaatgtactcgtgatcggcaccacaggctcccagaccacctttcttcctgagggagagctaccagagtgtgcccggttggcatatggggctggaagagaggatgtacggccagaggagattgcagaccaagaattagcagaagcccttcaaaaatcagcagaggatgcag

SEQ ID NO: 1273 - DNA, 110 bp, Homo sapiens
  full length sequence of bloodCirc_03851
gtttcccctcaaaaaacctataaggcatggaagtattttgaaccgagagtcaccaacagataagaagcagaaagttgagcgcattgcatcacatgattttgaccccacag

SEQ ID NO: 1274 - DNA, 291 bp, Homo sapiens
  full length sequence of bloodCirc_19220
tcacttgggaattcttcaatccttaaaaccagtcagcttggagattctcctttttatcctggaaaaacaacatacggtggggcagcagctgctgtaagacagtctaaactacgaaatacaccttatcaggcaccagttagaagacaaatgaaagctaagcaactcagtgcacaatcttacggtgtgaccagttcaacagctcggcgaatattgcagtctttagagaagatgtcaagccctttagcggatgcaaaaagaattccatccattgtttcttctcctctgaattct

SEQ ID NO: 1275 - DNA, 269 bp, Homo sapiens
  full length sequence of bloodCirc_16618
ggaggcttgtggatcagaatctgaacaaaattgggaaagatgaaatgcttcaaatgattagacatggagcaacacatgtgtttgcttcaaaggaaagtgagatcactgatgaagatatcgatggtattttggaaagaggtgcaaagaagactgcagagatgaatgaaaagctctccaagatgggcgaaagttcacttagaaactttacaatggatacagagtcaagtgtttataacttcgaaggagaagactatagagaaaaacaaaag

SEQ ID NO: 1276 - DNA, 174 bp, Homo sapiens
  full length sequence of bloodCirc_06199
gccggtctaattgaagccaacggagaactcaaggtcttcatagaccagaaccttagtcccgggaaaggcgtggtgtccctcgtggccgttcacccctccaccgtcaacccgctcgggaagcagctcttgccaaaaacctttggacagtccaatgtcaacattgcccagcaagtg

SEQ ID NO: 1277 - DNA, 510 bp, Homo sapiens
  full length sequence of bloodCirc_13881
gcataaatgaaatctcggaagatgtctatacggccgtagagcacagcgattcggaggattctgagaagtcagatagtagcgatagtgagtatatcagtgatgatgagcagaagtctaagaacgagccagaagacacagaggacaaagaaggttgtcagatggacaaagagccatctgctgttaaaaaaaagcccaagcctacaaacccagtggagattaaagaggagctgaaaagcacgtcaccagccagcgagaaggcagaccctggagcagtcaaggacaaggccagccctgagcctgagaaggacttttccgaaaaggcaaaaccttcacctcaccccataaaggataaactgaagggaaaagatgagacggattccccaacagtccatttgggcctggactctgattcagagagcgaacttgtcatagatttaggagaagaccattctgggcgggagggtcgaaaaaataagaaggaacccaaagaaccatctcccaaacaggatg

SEQ ID NO: 1278 - DNA, 171 bp, Homo sapiens
  full length sequence of bloodCirc_15830
actggtaataacaacaacaaagatggatctaatcataaagctgaaagtggagctctaatagaagctgcaaaatcaaagatacatcagtacaaagtacgagcttatatccaaatgaagtctctgaaagcatgtaaaagggaaatcaagtcagtcatgaatacagctggaaat

SEQ ID NO: 1279 - DNA, 222 bp, Homo sapiens
  full length sequence of bloodCirc_01339
agtaatgaacctcatgagacaatgccaattgctgcctttggacaaaaacagcggccttctcgattttttatgaccccaccacggttacattatactcctcctctccagtcaccaattatagataatgatcctttattaggacagtcgccgtggagaagtaaaatttctggctctgacactgaaacattaggtggttttccagtagaatttcttatccaagtg

SEQ ID NO: 1280 - DNA, 279 bp, Homo sapiens
  full length sequence of bloodCirc_21917
taaaacagaccatcagtaacatttcaggatttaatgaaacctgcttgagatggagaagcatcaagacagctgatatggaggagatgtatttattccacatttggggccagagatggtatcagaaggaatttgcccaggaaatgacctttaatatcagtagcagcagccgagatcccgaggtgtgcttggacctacgtccgggtaccaactacaatgtcagtctccgggctctgtcttcggaacttcctgtggtcatctccctgacaacccagataacag

SEQ ID NO: 1281 - DNA, 238 bp, Homo sapiens
  full length sequence of bloodCirc_17404
tgtgccacctgggcttgaaggcatgaaggaacaggacctgtgcaacaagataatggctaaaattctagaaaattacaataccctgtttgaagtagagtatacagaaaatgatcatctgagatgtgaaaacctggctaggcttatcatagtaaaagaggtctattataagaactccctgcccatccttttaacaagaggcttagaaagagacatgccaaaaccacctccaaaaaccaag

SEQ ID NO: 1282 - DNA, 208 bp, Homo sapiens
  full length sequence of bloodCirc_10799
ggttgactggattggtgaggcccgtgtggctacttctgtggaagcagtgctgtagttactggaagataaaagggaaagcaagcccttggtgggggaaagtatggctgcgatgatggcatttcttaggacacctttggattaataatgaaaacaactactctctgagcagctgttcgaatcatctgatatttatactgaatgagttact

SEQ ID NO: 1283 - DNA, 204 bp, Homo sapiens
  full length sequence of bloodCirc_08584
ccagaagaaattcaacagcagattgttcgagagactttccatctagtcctcaagcgggatgacaacatctgtaacttcttggagggtggaagtttgattggtggctctgactacaaactgatctaccggcactatgctaccctctactttgtattttgtgtggattcctcagagagtgaacttggaatcttggacctcatccag

SEQ ID NO: 1284 - DNA, 135 bp, Homo sapiens
  full length sequence of bloodCirc_09579
tagcacttgtaccatgggcttagttttgcctctctggagcgacacgctaattcatttggatggtgatggtgggttcagtgtatcgacggataacagagttcacatattcaaacctgtatctgtgcaggcaatgtg

SEQ ID NO: 1285 - DNA, 271 bp, Homo sapiens
  full length sequence of bloodCirc_01693
caagagcagtatgaaagtaccatcggattcaaacttcccagttaccgagcagctaagaaattatggaaagtctgtgtagaacatcacacgtttttcagattgacatctacagacaccattcccaaaagcaaatttcttgcgctaggatccaaatttcgatacagtggccggactcaagctcagaccaggcaagctagtgctctaattgacaggcctgccccacacttcgagcgtacagcaagtaaacgggcgtcccggagcctcgatggag

SEQ ID NO: 1286 - DNA, 19975 bp, Homo sapiens
  full length sequence of bloodCirc_20192
gatgtgcagtactcagacatcgactacatggagcggcagctggacttcaccctcagccccaagtttgctgggtttccagctctgatcaatcgcatgaaggctgatgggatgcgggtcatcctcattctggatccagccatttctggcaatgagacacagccttatcctgccttcactcggggcgtggaggatgacgtcttcatcaaatacccaaatgatggagacattgtctggggaaaggtctggcctgattttcctgatgttgttgtgaatgggtctctagactgggacagccaagtggagctatatcgagcttatgtggccttcccagactttttccgtaattcaactgccaagtggtggaagagggaaatagaagaactatacaacaatccacagaatccagagaggagcttgaagtttgatggcatgtggattgatatgaatgaaccatcaagcttcgtgaatggggcagtttctccaggctgcagggacgcctctctgaaccaccctccctacatgccacatttggagtccagggacaggggcctgagcagcaagaccctttgtatggagagtcagcagatcctcccagacggctccctggtgcagcactacaacgtgcacaacctgtatgggtggtcccagaccagacccacatacgaagccgtgcaggaggtgacgggacagcgaggggtcgtcatcacccgctccacatttccctcttctggccgctgggcaggacattggctgggagacaacacggccgcatgggatcagctgaagaagtctatcattggtgcgtgggtccttccccagggcctttgccgacagggcagggagttgggatccttagggaagaggtgaggaggcagatcatgagagcctggtgtgacacagctgtgcttctcgttgcaggcatgatggagttcagcctctttggcatatcctatgtgagtgtccttgggatcctcctaagcaccaagaaggtggggacatctttcagaaatcatcagcaggctccttttatttcctcttgtttcagacgggagcagatatctgtgggttctttcaagacgctgagtacgagatgtgtgttcgctggatgcagctgggggccttttaccccttctcaagaaaccacaataccattgggaccagggtaggacagtggcttctacctccactgttttatgtcacttgaaagacagtctccatttctgtgctaaaagtaatgcagtctctatttcctgggatatctttaaaaaaaggtgtttttttttgttttgttttgttttgtttttttttttgaaacagggatttactctgttggccaggctgaatcgtgcagtgtcccaatcatggctgactgcagcctccacctctggggctaaagcgattgtcccacgtcagccttctgaatagctgggataaaggcacatcccagcgtggctacctaatttttgattttttgtagaaatgggatcttgccatatttcacaggatggtctcgaactcctgggctcaagcgatccactcgacagcctccaaaagtgctgggattacaggcgtgagccactgcacccttaaaaattgtgaagacctggtgtctcaatgaaccatattcctcattgtgctttagattattatttttttcctgtatttcaggcagaattttaccaaatgttccaaaaagaatgtcttacagtgaaattttatcagctgtcttaggagagctttggtgactctttccggtctattaagaatattctctgggcctcatgtatagttttcttttgtttagctgtgagtgatcttcaattggagtatgcttttagtgaccttcttaaatcccctagaaattccagggcgagctcccaacactgttctctttctcctttagagacaagaccctgtgtcctgggatgctgcttttgtgaatatttccagaaatgtcctgcagaccagatacaccctgttgccatatctgtataccttgatgcaaaaggcccacacggagggcgtcactgttgtgcggcctctgctccatgagtgagtgtccagcagggatcccgatgactaatggatgacttattgcattctatgtggtagcagttgatatacacaacgcttccaaattaaagacatgatggccttttgacatgagctcttcagacacaaagtatacctgattactgtctttagcacagtgttatacataccgtaggtcataaaaaaagggtatttattgaatgacgaaaattgaaatgatgcagtacagcatagaatagtttcattctaatttggttgtgcaaaggcctatcttatgtagcagttttgttatatggacccaggtcacaaaagaaggatttcagcaagagaattgagggacgagggccatcctcacatttaaaatgtgccatggttaagaaatgaggtaatattttacaggagagaacacatctacatcccagcatttctgaagtttgaggcacatcccatggggaaagcagaggctgggtgctcctgatgaagctaggcctaggaacaaagcaaggatggctcaggggcagctgtatttccgacttggatctgaacttgaggagcttcttcagagtgtcgggctggggctctgttgggctctgttgggcaccttcatttccctttccaggtttgtgtcagaccaggtgacatgggacatagacagtcagttcctgctgggcccagccttcctggtcagccctgtcctggagcgcgtgagtatggaggcctccgatgaggggaggatcccagctgtgaggcttggggaaaaggacgaggagaagaggcctgagctggtgggggtcctgagacatggtttcttattctacctgtgtctcttcctctctttctgagctgaagtccatcacttaggtgttcttggcactcagctccttcatctttaaaatgagcctaacaattctggttcgtaggatgatcaagaagaaaacacctcatggaatagtcaatgacacaatcatttcttcgttaactaaaataattaatagaaggtcagatgggggcagtattgtaaaaaatttataacagtcctctagcactattacaacttttcagaaggatgacttggcaatgtgtgtacttgtattgctgctggctaacccttcccttcctctacaggagctcctcccagcagtaaaagccatttctttacttctgttgttgattaggcttctgattaaaatatcaattaattgtacctccctcaaatatatatatatatatatatatatatataaatatatatatatatatatatatttttttttttttttttttgagacagagtctcactctgttgcccaggctggagtgcagtggcatgatcttggctcattcaacctctgcctcctgggttctagtgattctcttgccttagcctcttgagtagctgagactacaggcatgtgccaccattcccggctaatttttttttctttttttgtatgtttagtagagatggggtttcactgtattagccaggatggtctcaatatcctgacctcatgatctgcctgacttggactcccaaagagctgggattacaggcatgagccatcgcgcccggccccaaaatctcattatacccacaaaattttcttctgccccagacacaacctcccttgtttgtctctttaagagtcaaaggggtaagtctatgtctataagcaaacagtgatttattttttcccgaagtcctggatatcaaagtgctttatgaaagccacttgttttgggtagacaaatctctggtttaaaaaagaaaacaggaagaaggttgccccagttgttaacctcttgggacatgaggcagctgggtccaaagccatcacaattatttcacctctttcctaagcagtttggttactctgtcctggaaaatggtggcactgcctcaccttgtttgtgtttcattttagaatgccagaaatgtcactgcatatttccctagagcccgttggtacgattactacacggtaagtttttctgaatgtttatataacacgggaatgtggtagagagtacaaaggctttaggtccgatagaccttaggtcaaatgctggctctgtaacccacctgctgtgtggtcttagagaagccactttaacccttgtaatctcagttttctcacctccaagtggggtaagaccactttcctcatagaaccattgtgaaataacacataaagcatctcactcagggtctgtttttttgtgggtgttctctttgtgttagtttttaatatttctttatatcactgctatttacaatgttgtgtaaaggcagatgctagccaacatctgagattgtgttgcaaactatagtttttgtttttattgttgatatctttgcctgctgtaagtttgtaagcatagaggccgttttgtctcttttgattaaatacctccttccatagcatagatgctcaaagaggggcgctgcacataattacataaggcacacaagtgattaggcaatgtgcaaaacacacacagaggtatgggacccaacccttgtgtgtctaagtagtgcaagtgcatttagaaatgaggaagcaatgaagagctccttgccgcatagtttcattgctagtatgattcccaaagactcagctgggaagccagggtcttcccgggcagctctggggtggtgggctcttgctgggaccctgacaaatcagaccctgattcttggggaagaatcaaaggaggtatttccttcgtttctaactaggcctcttcttctgactttctgaggagaacatagttgagggctggaaatacaacaaaggggtacaagcagggatacaggaagcagagcatgtgctggcccctttcatccaaggagatttcagtgagattaagtgaaaagtggagaaggatgtgcaattttgttccttctcttctcagtccattggagcccaagtcctctccacagccccagactcctcttcctgctgctagtctggatctgcccttagggtggtaacatgttaaggctctgctatgtgtgtcccagccaggcgtttcccaggaagaggtggccagctttctttacgtgagactggcctttgtcctgagtgtgcatgttgagtctcccattcactaccagaagatatctttgatggaagagggaaagacaaaagaagtcatggagcaagctgtttagaaaaagatgaaattgggccaggtgtggtggctcacacctgtaatcccaggactttgggaggccgagatggacagatcacaaggtcaggagatcgagaccatcctagctaacacggtgaaaccccatctctatgaaaaataaaaacaattagccgggtgtaggggcatgcacctgtagtcccagctactcgggaggctgaggcatgacaattgtttgaacctgggaggcggaggttgcagtgagctgagattgtgccactgcactccagcctgggtgacggaaccagactttgtctcaagaaaaaaaaaaaaaagaaagagatgaaatttttaatgtttaattaaaatgaagatgaatctcataattaggattaatgaagaagtgtcaccttaattaatcttcccaagtttgggtaactattactcattctagagcacaagctggcaaactatggcccacagccaaatctggttgttagctgatttgcaaataaagttttagtggaacacagccatgcatatttgtttgcttgttgtcaacaataactgcttcttacctgtaaagtagcagctctgaaatgagaggattttgcctaccaggggacatttggcaatgcctggagatatttttggttgtcacaacaggctgggggtgaggaggctatgcggctgacatctgaggattctgctaaatatcaaaaggcacaggatagccccatcgccagagaattgtctggccccaaatctcaatagtgctgagactgaaaagccctgctctagttgagaacatgtaggatggaaggatggtcccttaggttctgatacaggtgagagtgtagcagttcttcctgttacacatcaggcaaatgtagtttgtatggtggaagcaaaggtaagagaccctaacaagatattatagcagccttgcgaggttttatgcagcactgtgcgaatgcagaatgggtaatagcaggtatgttgcaaagggtgatgaacaggcataagttcagaggggaggatgagatgtctggcaggatgcattgttcagggaggggcctgtcctctccttcatcatcttttaccttcttctgcccccagggtgtggatattaatgcaagaggagagtggaagaccttgccagcccctcttgaccacattaatcttcatgtccgtgggggctacatcctgccctggcaagagcctgcactgaacacccacttaaggtgaatgacaggactcaggttttcctttacatttcagttagctcaacaatttgtgatgaagtctaccaaaatgtaagcatcactttcaaacccacatgcaattctactcaacacttgttttttctttgttttgttgtttgtgtgttaatctttttcagactctatactttttgtctaattattaacaactcttttaagtctaagggagtgagatgaaaggtctaagaatgtcattttttaaatctcacatctgacatggaagtcaaaataagagcaaccacaattcacaagagcttttcagaagctgttgttttagaactgtatccagtagattttgaaagactgtaattcatgtccttccttaaaccctttgaatttcttttcaaacacgctaacagccaggtggtcagcctccttggtttgccaggactgatgcattttagcaccagaactctcctctcttgagatgcttctcaattctgggtaaaccaggtcagttgatgcctctatctgccttggccacactgctcacccatgtttctttactcttgaatcacttattctcattttaggagggtcaggatccactttccaccctcctagaatctcaacttcctctttcttttctcccgctaagagatttctttcttgtgattcaaaagtggattcaaaaaaaccctcaaaagtctatgtcactgaattttgctttatacgtaattgattccaaaattatagattccatctgtactaaagaggtgtgcatttatatcttcatgcctttgagagtattaacctatttgtctttaatagactaggagttctttggaagccagaaacctgtcttttcttttgaacctctcttactgctttaatttttcaaattctagacttttttatgatactaatgggaaatatccctaaatccaataccagttggcttccattttctaactgttcaccttcaagctgttctgtacagtgataccaaattgatttttccaaaatgaaaatctcaactggttgctcccaggcttgaagtccaaagtctttcattaatagggtattcaaaaccaatcacaacctggttccacgttaccttaacaactcttatctcctgccatacctccatgtacatacagaccaggtatgccaaaaaactggcgatttcccaaacatacccatgtattttactgcatgtgggcttttgaatttatcctttccaacatctgtgcctggtgtattcttaatgatccaaatgaaactttacgtttcagcagcaagaagtctttccctaatcttccagcagaggaagcactgccacttccaagtttctggtcatttgtaatatatatttatttgctccttagatgattttgtctttcttctttagcagtgttagcatttcaatagtagttgcatactctgtgcatgaaaattgtagtatctgaagtgtttaggaccatctaaatctattgttagttctttgttgctgactttcctttatgttgacttattaccttgtgtgcttggtgattttttgtttcatactgtgataatcttaagcatctaaatgtgggtctccttcctccagagatgatttgccttctcctctatttgcaagccaggaattccttccatctgacatcacgttaacttccatcaaggatcccggcttcatgtgggaatcagaggttcacattctgtaccttggattactaggcttaatagcccaattttaaccttgctgtgggaatttgccacatggagattctaggttttgcttactaagcaccctttgagttctagctcagtgttttgctatcctgttattgttttggtctcttgagtatattccttactgtcttgcaaatccaagaacattttagcaggaatatatgttataatttatctaggatcaggtaatattttactgggtaagtctccagaagaatatacagtctaccatatttgtagaactgtgtttctggactcctagaatatcttaaatttgtgttgttttcactgtctgcgttcattttttagtgaatgtgcctaatttttcctataatattgaaggtcgttcaggtcaggggttgtgatttattaatttttgtatctcattgacttcctagaaatgactgctactcaatacatgaatatttaaagaaagcagatgattttgttgataatggaaactaactctcttgcatagtgaaaggctgaactgtggaagaatacagtggagaatgtgagtccagtgagagacagaggaggaataggaagagcaggaaactgagaggttgcctagagagtgacagagtgaggagagattccaaataaaaattgctctctatcctcttcttcctctatgtccatctactctaccatgtctttaagtaatgtgttgtgtttcctattctaaattctaaagtagatcattagaatgatttatttttctttcaaaacaaactaataataaataatcagatacattaccatttagtagatggaccttagtgtatgttgttgctttctgagtataaatggtccttaggcaggcgaaaatgtatcttcctcacagcactggacacttctcctgagggcatcattgctaaagtgatctgactgaaccagttattgcctaagatttctttctcttctcatactctgtattccgaacagtggttgcagaagcagcttttatttgagctattgcagtgcctctggtgcttaaattcttgcctccaacgtagatgttattgttaatgtttggggtgtttctatctcctgtgacactgttgatattatagaaaaatgcatctgtcgattttgtgtttgtacctcaagaaacagaaccatctgctgctagtatcttttccagtttgaaatttgatggaaatattctcagcccagttggcaaaattgtctgactcctgtctttgtctcttgaatcttgttccccacagtcgaaagaaccctcttggtcttattattgccctagatgaaaacaaagaagcaaaaggagaacttttctgggatgatgggcaaacaaagggtgagcgctgttacaataatgttgctgtttcccaacctgcgcctgtgacttatggtccttcactcctgctggtcattcagctgtgggagaaatctcagcaggcacagtagcaagagtcacttaagtattttgtttctggttgcaccattcagggatagtggtggacgaactactgacgaaagaaaaatgcatttgtatctctgacagttctcccattcgccagtgatacctataatggctcttattttattgtcaatgggtgcttagatgagaaggtttcaagactgttccctaattctatgttaatgtcttcctccgaaaattcttatgagcaaatgttgacgatataaaaatcatgcacctgccagtgaggcagtgagaatatactgttctagtgtgtactcagctagccatacgttttagcatatttgtgggtccagtatactaacaattcttgttcttcaagtttaggaaatagattcctttgaagcatatgccttggaagcccttggaagggaatctttgcaatgttctggtagaaaagagaaggaaaaacaatggcttggccttggagactcttgtccctctaatccaatatgtagattaaaaattaattatttatttggtagtcaaatattttgttggcaaataaagattgaatatatttaaggtggacgatgtgaggatttaatatatgtaggcatagtataatgattaccacagctattttaatgaacacatccatcactaccaatgctgcagactggatccccagaacttattcatctaagaactgaaagtttgtacccttgaccatcatctccccattttccacttctgcaggctctaagaacaactgttgtaggctctgcttctaagagatgaacttttttagattccacatatgagtgagaccacgcagtattggactttctgtctctggcttatttcacttagtataatgtcctcctaagtcattcatgctgttgcgaatggcagaatattcttctttctatgtctgaaaaatattctactgtatatatgtaccagaacatctttatctattcatccactgatagacacttaggttgttttcatatcttggctactgtgaagaaagaaattaaaaattgaaatgtaagggctaaaattgtaaagctcctagaagaaaacatagcaaaaaacctccttgacgtagtcttggcaatgactttttggatatgataccaaaagcaaaggcaaaatgccaaaaagtaaacaggcgtgactacatcaaactaaaaggctcctgcacagcaaaagaaacaatcaacaacatgaaaaggcaaactacagaatggataaaaatgtttgcaaaccatatatctcagaagagattaatatcaaaaaataaggaacatatgcaactcagtagcaaaagatcaaatgacccaattaaaaagtgggtgaaggacctgaacagatgtttttccaaggaagacatacaagtggctaactggtatgtgaaaagatgctcagcatcagtaaatgacacaggtatgcaagtcaaaaatcacagcgagatgtcacctcacacctgttagcatggaaatcataaaaaagaaaggagagaagtgctggtgagggtgtggagaaaatagaattttttagactgttggtgggactgtaaattgttacaaccattatggaaaatagaatggaggttcctcaaaaaattaaaaacagaacttccatacaatcccatgaattcccacttctgggtgtatatccagaggacatgaaaccagtatctttaagagatatactcactcctcccatattcattacagcattacttgcaacagccaagatatggaaacattctaagtatacattgatgaatgaatacaatggaatattattcatccataaggtaaaggaaatactgccatttgtgacatcaggatgtaactgaaaagagtgggagtgtgaaatctgttcttctgtggtgggcaagccggagtctgacttgtctttctgtcactttcagatactgtggccaagaaagtatatcttttatgtgagttttctgtcactcaagtgagtagcatatttttatgaatcttaggtgtgggctttggactgaccattagcacatctgtgcttgtgtatatgtgtgattatatttgtaactttatatgcattattggctataggtgagcacatttctatttatgatttcatcgatgttttcaaaaggaggcattaatatagcaagtagtgtttctaaatatagtttttaattatctgtgtgtttttatgattgtatcaaattagaggattatcaaactaatgttgtacttcttgagcagacactagtagagaaagcagagaggcattcatggcagtggggggtatccagtctggaatagaatatatgagtgacttgagaatctgtgtattacaggcatacctttatgcataattggagttaattgttttgcagaaccacttggaggtgactatttcacaatcaacctacaaggaccccaataatttagcattcaatgagattaaaattcttgggatggaggaacctagcaatgttacggtgaaacacaatggtgtcccaagtcagacttctcctacagtcacttatgattctaacctgaaggtaaaaacccattttgttgagatggtacattgagaattctccatagcaccatgatgtttcttcttgccaagtttgcatgggtccctgaagtaccagggcacctttgatgcatgttttggggaattgagagggcacctttgatgccttttttggggaaaaaaatgaggtggccagagctagaatgagttgggtatttttcttcttattcccttctctgcctatcagtgttcccatctctctagctggtttcacttgcttttcccaaaaatagaataattatgatgagacccaggaacagcaaagttggaaagtggggaatagcctgacattattagactgtgaattttgtatgactagcacaaataagaattggtatttgaaaaaggccagcttggataggaaacttgtggtcaggctttggaggtcttagttaccaacttgaattaattctcaagcagtctcatattgatccttgaatgaaggctgtgctactgtgtgtgagcattgttgggagtgggagtgggggctggggactagtagaacagggaagtacaagatggtttagatttagaggagactgggagaaggatgataatctttagaatgtgattttattactccagacgtgtgagaactttaacttgggaagtgctgtctagagaagcatcaaagataagaaaaatatatggaaaatattaaatatttgaattaataggattcaaggaaggtttcaaatttgcagcctttatgcttagaaaaataaagatgctgggatgttagaagtggaaagaaagatgattttatttccacctctcaattttgctgttgccaaaattgaaattcaaagaaatgaattagaattcccaatttgccctgatgtgattattattcattgtatgcctgaatcaaaatatttcatatactccataaatatgtatacctactatatactcattaaaattaaaaattaaaaaaagaaatcatttgtccaatatactacataaatgcgagcatgataaccaggtcatatgattcttattgctgtgttctttctaccactccacgccaatgggggatgctggtttggggactggagagcaagaggatcagctcactttgagatgacaccatgtgtcatgctaaagaggaagtgcagaagacacccttccagacaagacacagagggctaagaggagttagggtagaaaagaataaggggtgatcgcgacaggttttatttgacctaattgttttcattatgctatgtacaagattctgctagaggggagtcatatgccctgttactgctaaatagattcccccactgtacagttctcttcttataagctaaagtgatatgttgcttggatggttgaaagtctggactgatgtctatttgtttttccaaaataaataaataaataaagtcttagattttgcaaggcctttctcccaaagatgaatttccttgtgatttctgcattcctacaggtcgccattatcacagacatcaatcttttcctgggagaagcatacacagtggagtggagcataaagataagggatgaagaaaaaatagactgttaccctgatgagaatggtgattctgcagaaaactgcactgcccgtggctgtatctgggaggtaaccatgctgatggggttcatgtgcatgaaaatctccacacctaatctatagtttcttaagcatagcagtggcacttatataactacttaaaatccatagaaaggacttcctaagggacatgatctggatgtgacaagtaggtggggacatgtggaaaactttttaaaataaatattttgcttggagaccaggaaattaaatttatgttattgccaagtgataagtgataggctggttttattgtcatataaaatgacttttctaaccctgtttaggttagagaactttaagaccacatgctgtgctgatctatgactttggccttacttttcaggcatccaattcttctggagtccctttttgctattttgtcaacgacctatactctgtcagtgatgttcagtataactcccatggggccacagctgacatctccttaaagtcttctgttcatgccaatgccttcccttccacacccgtgaacccccttcgcctggatgtcacttaccataagaatgaaatgctacagttcaaggtaaacacggtacatatatcaggcagtgataagacccttttcagttccattatctttttctggttcaggtcacacaaccctaaaataagttaatcatgctacattagactatgtcattatccagagaacattgagaaatcattgagggaacaatgagacctgccctaattttcatttggaaaagattactgtggctactgttaggaaaatggttgggagagcaagagtgggtacggagagacaagttgggaggctgccagttaggcaggtcaagtgagggcttaggtttggactaaatactggaatgaaggtggagaacagtgcacctagttgagattcaggaagttgggttacagggtctggtgcttgattgaaagcaggcgacaatggagagggaagcatcaagaatgatgaccgcgttggtatcttgcatcttaatatggatggtgctgacatcaaccagaatgggaatactgaaaaggtttgtgcttgatcaatgtaagatgatatgttcagtttgggatactgaatttgagatacgtataaaatagccaccaacctgcagcgatttcatttctttccagaatttaattgcatttaaagactagggatggactagctgttacgtctgcttctctattaaactaatcttctcaaggataggaatgtgccctttcctctttgtgcttctgaagtctaatacagagcctggcagatagttagtgctgtaatgtaattgacagagtaagtgaaagtgatcaggacattgtcacattgcctgaaaatttctttacaatctgacatcaacccgaattctgagtttttgtacatcgtctaatgcagggatgatgctgttgtatgtttgtaccctcatcatagcactagcatgttgtaggcacctaatgggtttgaagtgaatgaacttccttggagttctagccttaaccattgactactctacctcttgaccatacagtagctctttccaaaatatttgcctctttctggcccactttaattctctctgccttcgtggttgttattcttcaccagaatgacttgatctcttttctgtgtttggttaatgactaccaagtttctaatactctagattgtatttctcctgggagaccatctcagtctcccagaaacaatgttaggcatttccttctctagagtctcacagcacttctacatagctctcccttagcacacatcacccaggtgttgtgagctgctctcttacacttctcatttgcttgtgaatttcataaaaccataacactgccttattgagctcacatccctagtgtcttgtgcagtgtcaggcagggatgtagtaggtactcatgaatcagtttagataccaccttcagcaaggacattctgattattttaatcaaatagatttcactttggggagacacgttatttttcaattcagaaaagttttaaggtatttatatattctcatatacccacagaaaataacaagtaacatattcataaataccacgctgattccagaatgattttctacgttagcaccaatgtcacaatgcttatattgatgcagtagaggccttagtaatgagaaatgacagacaaacatattaaatctgacattgttatttgatgtgttaattaaatctcagacatcataaacttaaagaagacagaaacatagcatctgaacttttgtccaaaaatcaaaaaggttctgctaagggtataggtttcaagagtagtattcttgcctaaaatcgttttcctctggcctagatttatgatcccaacaacaatcggtatgaagttccagtccctctgaacatacccagcgtgccatccagcacccctgagggtcaactctatgatgtcctcattaagaagaatccatttgggattgaaattcgccggaagagtacaggcactataatgtgagtggcttctagtgtgactcagagttgatggctacctgcgccttcgctgccaggtccattgtccttggatgtatcctggttcaaaacatcacattgtccacttccagatccatggatgagttgtttccttcagacctattcttacaggaaatctttagcattctggaaataattactgaggcagttgagcgtgcctgaggattcatccaacaaatgtttatggggtgccttctctagattaggtgctgctccttatagacaactgaggtttctcttctcatgacaacaaataataagtaaataacagagataatttaagttatagtataaaaaggagattgtgatagtgataattgctgtgtagccaaaagagcagggtaattgagggttatggtgtggttactgcttctgatattggggtcagagtagatctcgccaagaaggtgatattttaataggacctggatgagaaggagccacccacatgagacagggcgaagggaaagagcatttcagacagagggaataggaagtgggtaggccaggagatgaagcgaagctggcatgctaaagaaaagaagtctagtgtggttggagcaatggaggaagtaagcaggtgagtgctgggagaggaagctgcaacgccggttgagggggcagcttcagccttgaaggcttcataagatgtttgcatgagaagccatggaagaagcacaaatgggagtgacatgaggtgagatcctcgtaggaatatcgctttgagtgctacgtagaaaatgcgctgaggggtgcaagggtggaaggcagtgctggtgtggagtgttcccagctgtgatggtgaggggagcttgtatttgtattgtagaggaccactgaaaggaggcagtgagagtgggaaacagatgaatgaagaactcctgggcttttagtggggatatctatgatattttaatcaaattgagtttcagttttgtttgggagatgaacagcttctgggtaggaatcaagtgttctgttgtccttgaaaagtcagctgctggaagcagagagaaaagcccattttctgtttcaaatctgcctttttgtgtttcagttgggactctcagctccttggcttcaccttcaatgacatgtttatccgcatctccacccgccttccctccaagtacctctatggctttggggagactgagcacacgtcctacaggagagacttggagtggcacacttgggggatgttctcccgagaccagcccccaggggtaaggacagagcatttgagatctgtgtctctgcttctctccacccacactgctcaggctttgggcttcatcttcccaaactccacttggtcgtcacattctgcttttaggcgagtgggccaattctcaggctcctttgtttcatgtgtttaattgatttcatggagaaaactagacccatcttagcaagcatatttttgttgagtttctttctcaggcataatgtcttttaaactcctactgcttctccccatgactctccagtacaagaagaattcctatggtgtccacccctactacatggggctagaggaggatggcagtgcccatggagtgctcctgctgaacagcaatgccatgggtaaggccatccagcgcctcccttattttggggggataccagtcatgcctgagtcagtttagaatgtgtttagcctaactgttccttgaagtcaaaatcttcattttacgggcactgctgtttattttttctttgtgtttagcctttctgttcatttcagtctaatatcatgtgataagaagatttaacccaactcttattttggtaaaaatcacataagaagggatagtaaaaccacatgggtcccaaatgtcttggaggtcagctcgtgagagccagttataaaatttgaattagggtaaaactatgggtcagagaagttagtctggggattgtgagggtgtatggtatgttgaaaagttacctatcgggtactacgtttgctatctggatgacaggattcataccccaaacttcagcatcgtgcaatattcccatgtaacaaatgtgaacatgtacctccttatccaaaataaaagttgaaatgtaaacataattttaagagtagaacgacaaaatatagtaaaatacaccaaaggaagcaaacccaggaatgggacatttagacttccactgaacttcttcagttctatgtgattatgatagaaaatactggctcttactactctacgatagggagggtgcaggaaatagagaatgtgtggatttcaggggtgattcatgacgtggaaagtttccagcttgattagcatttttcttcattttcagatgtgacgttccagcccctgcctgccttgacataccgtaccacagggggagttctggacttttatgtgttcttggggccaactccagagcttgtcacccagcagtacactgaggtagggagaaatccaattgtttatcaagtacttatatagcacattctgggtgccagagcccacattcattagtataactctcagatgataactggaattattggtattacttggaaagagattatagaataaggaaaaataaatacattctaatcaccattaaatttatagcctctgtaagcattgcagaatagcagaagttacagtggtactagtggtggtgatggtagtgatagtagtatggtggtggtggtatttgtggttatatggtggtggtgatggtgatgatggtggtaggggatgatggtggtgatagtgatgtgggaatggtgataatgatggtggtagtagtagtggtgttggtgatggtgatgatagtggtgggggtggtgttgatgggagtgttggtgatggtggtgatagtggtggtgatggtgacgatgatggggtggtgatggttggtgtttgatagtgatggtggtggtggctatggtggtggtagtggtggtgacagtggggtggtgtgaagaatatggtggtggtagtggtggtgatggtgaaaatagtgatgatggtggtgaccatggttgttgtggcagcagcagcaaacacttatgtactacctactgcacatcactgatttattacttgctgcatgttagagcactttgcacatagtaactcattcagtcttcacaaaaggactgtgagggagatgctattattatacccttatttacagatgaagaaactgaagcactaagagattacttaatttttgcctaaggtctcacagctagcaggactggagcctgtatctaagccaggcattttgcctctgattctgggtttcttaaccagttacctacagtgtctctaggaatggagtgaaatcagcttttccataatttttaagaaggagctcaagtctagcagaaagctttctccaagtatcctagtggctctatatcctgtcagttttgatgtggaattcaattagttagttgtctagcttggggcacagaaaaatattcttattacttgatgtaaaacttcaatctggtgtctctgttctgaggactaatattttctgtctattttctagttgattggccggcctgtgatggtaccttactggtctttggggttccagctgtgtcgctatggctaccagaacgactctgagatctccagcttgtatgatgagatggtggctgcccagatcccttat

SEQ ID NO: 1287 - DNA, 10337 bp, Homo sapiens
  full length sequence of bloodCirc_03072
aaaactaagcctacaaataatcgaacaaagaaagctgtgaaaacagtgaagaaaaaagacaaaggaaaatctgaggattcagaaaagaagatgtctccagaaaaagagtttaaaataaaagaagatttggatcaagtacagaaagtagcacgtctggaaattgagaacaaagtccttcaggagcaattgaaacaggctttacaggaagctgaaaaagctaagcatcaacttaactatttcctaaatcaagagaagttacttaaaagtgaggggaaaactgagacaacaatgcaagtgggtaatagtcaaacaaaagttaaaggtgaagattcaaaaaatataccattggagaaagaaacaagaaaatcactggtttcagattcaggtggacaaaggacaagtgataaaatccaagaatatccacagatcactgcccaaagcggaagactgattgaaaagagatgctaatagagtttctgaaatactttggaaaagtctcccaaaccttcagagagtggatgggagcgaagtaaggagaccccacctgagcagatacatggtattgcttacaataaagtacatttttgctctttacaacatttatcagtttattttggcttagggaatgagttagtggtaaatagttaatcaaacaatagattttaataatttattgtttcacatcatgtgcgttgttagcttttcttaaatgttttgtggcattgaaattcacactttttagaaatgaaaatgtgaactaattcatggtgttttattttgaagagttacacagtcaacctagttctttctaaatactttcattaggactttcattattacttgggtttgctatcaagcacgaaaacatacaagagaagagtgttggaacatgtccattttttttctccatagattagatgattagctgttaaatttactcattcatttattcacccaactcattcaagagatacttttgtcaccttcatatgtccagttctcttttgggtattgtgttttactgaaaaatcagacagataagatgccttttcttgtggtacttacattataacaggagagacaaaaaataaacaagtaaaaataaatgaacaagataattttagagactaatacatggagataatgaaactacatatctgacagtcacagggaaggataatttagattgggtggtcaaggaaggtattaacaatgaagaaaaggcattatctaattgtgaaataaaggctgttaaaatattttgtttcttttcaatttttatcaaaataaatttctgcaaatgaaaatgtatgttataactaaaagatctagactagaggagcttttaatatcctcagttaactgttacacaaggggcatattactagtgacccaaatagtacgcataaggtagattttatagaggaaaccttgcaatccaggaagcaatagaggatataatatcccctgagctgtcattattccgtagagaaatagacttagattaagcaaagctggattcaccatagaagatgctcctgagaggaacccccttctcacatatcacttcacaaaattataggggaattgggagggcatagagagcacctagtcaaccatgtatcactgagagcttcctggttggggcagtggccttgttggaaaaagggagaagggagtatgtactttgtataccaatgtagctggtatcagtgagtcaaacagtcctggtgagccagctctgtgaaaccacaaaaagagggaagaaagagaatcaccgggaccatccgtaaataaagatttgcctcactgctgtctatcctttgatcttagagactcattattatagatctctccatcagccctggctgacacctggttctgagcataccaatttccttagtattgtctgggagaagaatattagtaaggtcaccagctgggttagatgaggatgtagaaccaacatcctaataagttcacattatgaactctttttcctggccaagcacagaaacctttgtttaggaatgtctgttccatatctgccataggaaagagaaagtcgttcatcacctcccttgaacatccatctccaaccatttcccagggtcagatatgttcacatctgacaaacagatctgtttttctccatggagatgagccagattgtcctttgtctggaatgatagttcagtggggaccccaaagttaccattttgccatcataggtcacctgcaggtttcaaagaggatgtctgcagcaccatctgttgcttttaaatgagcaatatgttgtgtgttcccatgcactgaggtcaaagcaaagggggttaaaaaaaaaaaaaaaagaaaaggagtatactattcctcttgaaatgatatttttctctactccctaacttctaggtgctttggagtttaaccatggtaagaggggcccttgcttggtacggtagcctatagcttgtaaacaattagggaaaactggactgacaagccttgtggaggttgttttcaaaaaggctgccttaaatggcaagtagaataagcctgatggacaacagtggcctgtgtgtctttttttttttttttttttttgagatagggtatcactttgtcccctaggctggagtgcagtggcaccatcatggcttactgcttcttcaacctcccacactgaagccatcctcccaccttagctgtctgattggcggggaccacaggcatgcatcaccatgcccagccaattgttttattttttatagagactcagtctccctatgttgcccaggctggtctagaactcctggactcagggacttttcgcacctcagcttcctaaagacttctatgtcttttgaataaattccttattggccattgtgttccttcatagcgggatggatttgaacaggcacccaagactatactggagatgatggttacacattcttaattggctttttcatgtcacatgttttcctttagattcagttctttctcatggacatataaacatagaatataagaattgagcttgtgactaagttgttgtaactatttccttgggcaaatgttacctcagaaaagcatgtgtaaagagttctgttggccaagtgtggtggctcacgcctgtaatcccagcattttggggaggctgaggcaggcagatcacgaggtcaagagttcaagaccagcctggccaatatggtgaaaccccatctctactaaaaatacaaaaattagctgggcatggtcgtgcgcgcctgtagtcccagctacttaggaggctgaggcagaggaatcacttgaacctgggaggcggaggttgcagtgagctgagatcgtgccactgggtgacagagcgagactccatctcaaaaataaaataaaataaaataaagagttctgtcctagggaacccaatagcctgacagtgtaactaggctcattactaatggctcattagtctttataatagtgcaattcagtcaatctgaggagattgtgctctatggccatgaagaatgcctgaagtttacccagttttgaagcatgtccaataccatgggatctcaacaactcaccatcattatggtgaaggaatgtatcactccataagattttatgacctttgagagaggcttttccattagtgaatcatgctttcttgtcaggtggcaaatctttcaggcaagtgccttactgagtcaatggcttgtttaaaacagcagagggatctctgtgcctgtgagtgtagggccatattttatgaatttgtctaaggtctaattgattggatgtgctatatcccccttttaatagaattttcctgggcatgtaccaccttatcagattttggattagagaagacccataatgcgataggaatgtcgggttgaagagtgagaaaagtctgccccattagggctcagtaataggctagcagtcactggcatgtgccactcagcaggagaagaaaatcatttcatccaaagatgtaggaaatgacaaataacttgaagtatttttgccaaaagcttccgtcagaaaatggtttcttacaggtatgtgtaatcccatgagtttgaaagatacggcaaaatctaaagttagaacttgtttttaggatgcctagacctcttccaaggcatgttaatatatgggcttctattttaaattagttgcattgatatagtgctttgaagaatcaccaggtgtaaaatgtgatatcaccactacctaacaaggaaaatcgtttgtggttgggactggaggcccgataaattttcctttaaagcagcagtttcctgcctttttagcaccagggaccagtttcgtggaagactccacagaccaggatggagggggtggtttcaggatgattcaagcacattacctttattgtacactttattattattattatttcattataatatataatgaaataattatacaactcaccttaatgtagagtcagtgggagccctgagcttgttttcctgcaactagatggtcccatctgggggtgatgggagacagtgacagatcatcagacattaggttctcgtaaggagcacgcaaactagatccctcacatgtgaagttaacaataggatttgtgcttctatgagaaactaatgcggctgctgatctgacaggaggtggagctcaggtggtaatgcaagcgatgggagagtggctgtaaatacagaggaagctttgcttgctcactcgccactcacctcctgttgtgttgcccagttcctaacaggccatggactggtatcagtttgtggtccaggggttggggatgcctgctttaagtgatatagaatgtatctttttgatgctgtccagatgatgactgccttctccaaatttatctgaataacagggccctggatcatttaaagttatctttaatcaggtatgcctagacaacatgtaatgtttcttcggtgttgatcacagtcatcagtgtgatataatatctggagattctagcaatgcacattttactgggttttgtcccacattgaaaatgtgtaacaggaattaaaacattctcaagaaggattattaaaggtatatgtactaatcttggcatatcttgccaaatcctcagctacatatgtgtgtcagtagtggcagcaatttattctatagcttgtgtaaggacagagactggagtaagtagagctgtttctttccttgtttaagtttcagtagtccactatggagtgtcaagtactagtttttgttttttttttcttaaccaaacagactagcattgcatagtgcattgattacattttgtttgaaaaatactttatttttatgtttcttgtatgaaatattatggaatgatcttgccagttcagacaggttttcaccatgtgcttggccagccattatggaggttatcaatagataattatccaactaatatggctgtgtacctgttctcggtttaataattcagaatgtccttatatcaattatataatctgagaaagaaacagcaaacagtattaatatagagtacaaaaatagtagccttgtgtgtttgggttccccaagactactgccctcactaggagagctcacagcactcatcaaatagtcattacgatgaccatgatttattacataaaaaggatgcaaagcaaaatgagcaaagggaaaatgtgcatggtaaaaatccaaaagaaacatcctacttaatctgagattatggtgtcccgtaattccttagctacctgatcactatagccattctcactgagaacaagcaatttgttctttcttgagtttttaagactatatacgatatggacactgagatattggccatttcaacttagtagtttgtctggtataaggcttccaatggggttatttcccacttcagcggtagcccaaactctctgtttttcaaaagctgtaacatacacgagtcacataccactagctacacataacaaggtttattgagaaaaacttacaagcagaatagcgagcagagcacattgcaatattgcagttatcaatgaaggaccttgagagtctctgccaagctaccaagtagggaagggagatattaaccgaggccattcagaaacatgtttgtcattctcattaactgatgactttttttttctagtaagagaatagtttttcttttatcctatataatttccccatagtttgagttccatttctgattatttcagtaatagcattgctggtggagctagatgtagctaggcaacattgtcagcataagaattatttatacatttacaaactatttctaagcagtccatcaccctaattttctttaagttaataatttcaagtgttttaaccttttatcttttccaggctcttagtcatcttggacttttactgaacctttaaaactttttgactttcttttcagttgaggagcctaaaactagtcactatgaatattttgatcaacattaattgtattgtattgtaaaaactatcaaaatatttataacttttgacttttataacacctatattgaaatttttctataaaattgatttttagaatcatgttagtttgtactgtattacaaacttcgggtcctagatatttttgtttttcttgtatataggaatgagttccacatgttgtattgttgcagataagaatatcaataatattttattagtattttattgataatttgtctcgtatttgcattgataattaaaaattcagtgtaacataaatacctgtgagagtttttttccctaaggggagaggatatggattgggggttgtgttgacattttagaaaatggatggagttaaggaaagttccggaaaaagaaagtattggaaagaaaaaaaaaataaagagggcagtttgaaaaagaaggtattagaaagaaaaaaaaataaagagggcagtttgggcagttaacattcaatgacattttccattttgtctgatttaagaattatgaagtgtccatgattatatgcataataaatagtgcccttgtacatctatttgcttagtaagaaaaggatgcaatgctcagatcttcagagttaacaaatgcttttgcaagcaggaagagatacactctttataccacttcagtgatgttgaagactgtcatgtagagtgctgtcaatatgcttatataaaagctgctaaaatacatgctcataattagactattatacggtagtatttagacatggagtgattattagagagtcttaatctaaagcagacagtgaatgacacaaatttagtaagatttataaactatattttggttgtttttggcaattcaccaaataattgggagggtgaaaacaacttgctttattattattttctttgtggctataggctgccttctatagtcatcattgctgttctcctcctcctcctccttcaactcctcctcttccttctcctcattctcctctttctcttcctcctcctccttcaccatctaatcagtagggctttgaaagtatttccacatctctttgactggcacaagcttgaatacagcattgcttgcacaccttcctagtagtttttattcctgaccccctcagtggaagtatcatggttgttatgctgtggttccttatggatgcaagagacaacagaagtggggaaagcctgaacgtgggaatatggttataaatgtacagtatattagcatttaaggcattgttctttgtattgccacatattttctcattgttataagaaaattgcctgtgtagaatcaagtgattaatgatgtcccctaataaccatttcagaatcttaaaaaacatttgctttctatttttagctatgtgataatattagtgttggggtggtggtttgtgaataactgtaacaaatagtgtccagatgagtgttagactttattttagaactaatcatcttaaattcaaacacctaatagaactaataaatcaggtttgagaatgagatgctatccttaatttaggataggaagccagctattctctttacttttaatatggcaatttgctttataatgccactacaaaagtctgtttgtcataaattctatgtttttttaaactgtcagcactatatatatatatatatatatatatatatatatactttttttttcagagctgtcctctccaccccactccccttttttataacccaaactttgcagttcaaaattcattctaaactaacaaacgtaggataggtggcagtaggtacattgaaaaatttttcttctgtgagaccaaacttcaaattattttaaacactttgcaacaaaccttaggcaaattatgtcaactggggtaatagctgttcaaaacaaaatgcatcaaattctgttgcatttcataggactaggaaagctttgttaaatttttatatagtttgatcacttaaattatcatctaaactagaatgttgggacaacaagcagaaactgggattgtgcatgcaaactgtgacacctggttaccctagttctggaatccagaaagctgatcctttggcaactggtagagaataaataccccttatcttaaagaaaactaactcagagcttgggaaattgactttggtgaaagatggtgatcttttaatgtcaaagtgactgtggagatattttaattttcattctgaaataaaattgtggaaaaataattttggaataaatgtgactaaagggtaaatctccaaaccatcctatgttctactttggctgagtaaatttttcttgttctatggcttacaaccttgaataatgattatattggagtattttaaatgatttccttagtattatgtatccctttaaatcacaggacatatgttactatcttcaacttgttacctagcatcaatttcatattggaataaccataaactaatgagtaattatacttacttatttaatatccttatatattattaaaatgattcttcagttgcaaataaaatggtcttcacataatctaataccagatgttttataattctaaagctcagagaagaaacgatctagccctgctatttcagatctttcacagatccttaagtctcaagatgaatcagcatttttagagagttcaaatgaagtttcagttgctgaaaaccaatcctataaatctccatcagagacccatgataaatcacttacaacagtatcatccagcaaagaagttcaagattcactgtctgttggaacattggctcaaaaaaacgaaacagtgatatcaccattcattttacctcctgttcttacagaaagtaaaaaggtatgatatatatagaaacttgaaagctgtttatttcatattgctccttcaataaataaatgctaacccatttaaatgggttaaaaattcaatattttcttatttcaagagaattaaaagtttgccttttaacacaacccactttatatttagaatgctgaaagtaatatttgggaatctaagtaatattcttaacttataaaaattgtttaatattgattaaaaagttgtgggttacattttagttttaatggtaatataaaagatatgtcattctgagataagggaaattttcatagttttcagcttcatctacaaaaaaaatttttatacaataagatgattgtaaaagcaaactaattttgaaacaattttatataggtctctaaacaagacctagaaaatttttagaattgcttttgttaaaaagcatttaattaggaaattctcagggcaaaaatgctgggaaaaagggaaaagataaaagggctgtacatatttgacatgtatccacaatatatttttatcatacattttattaaagtattcctataataataattttgtaagccatttgagttcttctaaagattaaaacagactaaaatataaatctaaacaagaatcttaataattattaacactatttgcttagaactatttgcgagggaaaaatcacaatattgcctgggcaccctccttgctattcagtgttcccaattgcctctcaggtccattaattgttctgactttttaatttgatacattcaggaaataatgaaaaataaaatgtttctgcaatgacattgtagatgagagcaaaaagctagctctttttctcaaagcaggtaattaaataccagtcttgatatatatatatatgtatataatttctaattacttattacaacttttgttattaaggctgatgtttcagaagaacaattacaaaagatgactgaagaacaaacttaccaagcagcagaaaaatctcaag

SEQ ID NO: 1288 - DNA, 219 bp, Homo sapiens
  full length sequence of bloodCirc_21122
gctctagaccaagatagaacagcccttcagaaagtgaagaagtctgtaaaagcaatatataattctggtcaagatcatgtacaaaatgaagaaaactatgcacaagttcttgataagtttgggagtaattttttaagtcgagacaaccccgaccttggcaccgcgtttgtcaagttttctactcttacaaaggaactgtccacactgctgaaaaatctg

SEQ ID NO: 1289 - DNA, 396 bp, Homo sapiens
  full length sequence of bloodCirc_11808
gaagcctggagccagaggacttttggtggctgaggccttagctacctggcttacacattaaggaggacacagatttgcttgctgtctgtctgtcaaggcctggctcagctaaggacctgttaacatttctagagaagaaaacagcattaccatggatttgaatttgttgaaatgagcagtcgtaaatcaaagagtaacagcttaattcacacagagtgcctttcacaggtacaaagaattttacgtgaaagattttgtcgtcagagtccacatagtaacctatttggagtgcaagtacaatacaaacacttaagtgagctgctgaaaagaactgctctccatggagagagtaactctgtccttattatcggaccccgaggatcaggaaaaactatg

SEQ ID NO: 1290 - DNA, 724 bp, Homo sapiens
  full length sequence of bloodCirc_18633
agttttggaggctggaaaggcaaatgttattttaccaaaaagttcaccaagtggaataactcatgtgattgccagtaatgcaagaattaaagctgagaaagaaaaagataactttaaggctccattttatccaattcagtatctaggggattttcttttagagaaagaaattcagaatgatgaagattcccaaaccaattctgtttggactgaacatagcaatgaagaaacaaacaaagatttcaggaaagatgcaggatttcttgaaatgaaaggtgccttaagagagaccatgtatagaacccagaaagaaatgcaaaatcatgaagatgttaatgttggttctattttgattcaacatcacaaaaaagaaaaattcagtggttccagtaaagatttgaaatttgttaaaatgagaaatacctttggaagccatacatatgaaaatcagaaggaaattaagaaaaaagatgaagatattcagaggagttatactttgaggagaaaacgcaagaaaggaaaagaaagcaattgcaagaaaggcgttgaacatgaaaaaataaaaagtaccttaagaaggcacatatataatagagatcagaaagaaatgaagaattctatttttgctgaatatgccaaagaatcaaaagccatggctattaagacagatgtggatgttgttgaaataaaaaataccttaaggaagcacatatatagagctcag

SEQ ID NO: 1291 - DNA, 137 bp, Homo sapiens
  full length sequence of bloodCirc_06793
tgaagttattcgaagtcattgaaactgaaaaaacactctacctaatcatggaatatgcaagtggaggtgaagtatttgactatttggttgcacatggcaggatgaaggaaaaagaagcaagatctaaatttagacag

SEQ ID NO: 1292 - DNA, 410 bp, Homo sapiens
  full length sequence of bloodCirc_02441
gttgaagaaatatggagatcaacacaaaactgctcatcagtgttacctgtatcagctttttcacctttcagcttcttttctactttgtaagttactggttttcagcaaaagtttctccaggtttcaatagtctcagcttcaaaaagaagattgaatggaactcaagggtagtatccacatgccattctttggtggttggtatttttggcctgtacattttcttattcgatgaggctactaaagctgatccactttggggtggtccatcacttgcaaacgtgaatattgctattgcctcaggctacctcatttctgatttgtccattataattttgtattggaaagtgattggtgacaaattttttataatgcatcattgtgcgtccctgtatgcatactaccttgtactg

SEQ ID NO: 1293 - DNA, 276 bp, Homo sapiens
  full length sequence of bloodCirc_00317
ctttgcttgtgccatctgcccccatcgaccggtactggacaccctggccatgctgactgcccaccgtgcaggcaagaaacatctgtccagcttgcagcttttctatggcaagaagcagccgggaaaggaaagaaagcagaatccaaaacatcagaatgaattgagaagggaagaaaccaaagctgaggctcctctgctaactcagacacgacttatcacccagagtgctctgcacagagctccccactataacagttgctgccgccggaagtacag

SEQ ID NO: 1294 - DNA, 242 bp, Homo sapiens
  full length sequence of bloodCirc_05925
gctgacttatccttgtataatgaattccgattgtggaaggatgagcccacaatggacaggacgtgtcctttcttagacaaaatctaccaggaagatatctttccatgtttaacattctcaaaaagtgagttggcttcagctgttctggaggctgtggaaaacaatactctaagcattgaaccagtgggattacaacctatccggtttgtgaaagcttctgcagttgaatgcggaggaccaaa

SEQ ID NO: 1295 - DNA, 274 bp, Homo sapiens
  full length sequence of bloodCirc_09920
tacactcagaagaagccttgtttttactggcaacctgttattaccgctcaggaaaggcatataaagcatatagactcttgaaaggacacagttgtactacaccgcaatgcaaatacctgcttgcaaaatgttgtgttgatctcagcaagcttgcagaaggggaacaaatcttatctggtggagtgtttaataagcagaaaagccatgatgatattgttactgagtttggtgattcagcttgctttactctttcattgttgggacatgtatattg

SEQ ID NO: 1296 - DNA, 268 bp, Homo sapiens
  full length sequence of bloodCirc_18485
ataagtttataccatggatagcacaaaggagaagtgtgacagttacaaagatgatcttctgcttaggatgggacttaatgataataaagcaggaatggaaggattagataaagagaaaattaacaaaattataatggaagccacgaaggggtccagattttatggaaatgagctcaagaaagaaaagcaagtcaaccaacgaattgaaaatatgatgcaacaaaaagctcaaatcaccagccaacagctaagaaaagcacaattacag

SEQ ID NO: 1297 - DNA, 457 bp, Homo sapiens
  full length sequence of bloodCirc_06721
gtggctcaatcccttgtttaaaattggccataaacggagattagaggaagatgatatgtattcagtgctgccagaagaccgctcacagcaccttggagaggagttgcaagggttctgggataaagaagttttaagagctgagaatgacgcacagaagccttctttaacaagagcaatcataaagtgttactggaaatcttatttagttttgggaatttttacgttaattgaggaaagtgccaaagtaatccagcccatatttttgggaaaaattattaattattttgaaaattatgatcccatggattctgtggctttgaacacagcgtacgcctatgccacggtgctgactttttgcacgctcattttggctatactgcatcacttatatttttatcacgttcagtgtgctgggatgaggttacgagtagccatgtgccatatgatttatcggaag

SEQ ID NO: 1298 - DNA, 546 bp, Homo sapiens
  full length sequence of bloodCirc_00393
ttccaagatgagatgggattctccaacatggaagatgatggcccagaagaggaggagcgtgtggctgagcctcaagctaactttaacacccctcaagctctacgccagcttctgttactgatgtaaggatgcagagtcctgtcaggagttaggtgtcaagtgaagtctccttgttatggggcagtgcagctgtaggccaagctgtatctgtttgggaagggagaaaaaacagtagctggcatccatatccacttctccgggtttgaggaactactggccaacctactaaatgaacaacatcagatagcgaaggaactatttgaacagctgaagatgaagaaaccttcagccaaacagcagaaggaggtagagaaggttaaaccccagtgtaaggaagttcatcagaccctgattctggacccagcacaaaggaagagactccagcagcagatgcagcagcatgttcagctcttgacacaaatccaccttcttgccacctgcaaccccaatctcaatccggaggccagtagcaccaggatatgtctt

SEQ ID NO: 1299 - DNA, 2010 bp, Homo sapiens
  full length sequence of bloodCirc_01882
catctggtgcaaatcattttacatgtattttctttgatccttactataaccctatctatgaggtaggtactattattaacttcatttcatgtgtgagcaagaggaggtttggagaagtaaactaacctgtctaaggccaccagttaggaaatggcagagccaggacttgaacccaggctgactctagagctcattctttttttaaaaaaatttttttttttttttgagacaaggtcttgctttgttacccaggttggagtgcagtggtgcaatcacagttcactgcagcctcaacctcccaggctcaagaaatcctcccacctcaacctcctgagtagctaggactacaggtgcgtgccaccatgccaagctaattttcttttattttttgtagagatggagtctcactatgttgcccaggctagtctctaactcctgagctcaagtgatcctcctgccttggcctcccgaaagtgcagggttataggcatgagctaccatgcccagcctagagctcaccctcttaaccacttcatagattgtctgaatcttggaatatgggtccatagaggtctccttctatttgatttcaggcagccttgggttagcttggagctctgggtcactctgagcatgtctacccagggtgtgcttcagagtcactagaaagttgaggggttttgggattagggataacgccagggaatcctgggccctacttccaccttcaaccataattgataaaatagagagcttttctcatttacttaacttctcttgtccagtttttgagtagctagtaacctataggaaagtgggtgggacagtcacaaaaaaatgtgtcctaatgtgatcctaacctcactatgacctagtgctatgttgtcatttgcttagaggggtatgttgtataaaatatgatttaaagaaaaacaagaacaaccctaaaccagtgtgctttttgccatgagaaaacagaattgggtgtttaaaatgagaatgtgttcaacgctagcttcatcttcagtttcccagtctccctttgacaccccctccgtgtgtcatgaccttttccatgaccttcagggactgggccttctgacttatacaaaagcctcctctttggaaaggatttgaaccttggagagaatttaagagatgagttgccttttcctagagcatttacattttaaactttatgctcacttgtggcatgagagattctgtttcctgctaaagcaatttcaggcagtagcaaataggtggggaaagagctttacaggaggaaatcctttagggtctccctgtgattcatgcacacggtcatctggacctgctagggataattttcctcacttggttagtaataataacaacaactacacacttatgagcagttgttctgccaggcatttgtggccagtgcttggcaggcagtatctttttgaaccctcacactcatctgtgaggacagtttcccttcatagattaagaacccgaggtccagagatgttatgcaaccttcctagggacacagagctagtaataggtagagctaagatttgaacccaggtctttccagcgccagaccctgaatttgtaggattagtgccttcaggatgacatggagggacctcactgccttgatctgttatttatcaagagtcaaactggaaaaggctgtcagggaaacctccaggctgcatcttgggcaaagattggcttgaaacaggcatttcccaagcctggccttggacaccaactgtaaaaaaaaggccattactggtgtttccttggttagttctgggtataagttctggatcctcactcatctcatctgcactgacatcctcactcacggcatttagagacttaacacgccagcctctgtgtgagcatttacctctttcaaccctcaccataatcccacaaggaggcacagttcttttacccattttgaagatgaagaaacacagtctcagagaagttcggtcacagtatcacaaggag

SEQ ID NO: 1300 - DNA, 973 bp, Homo sapiens
  full length sequence of bloodCirc_03896
cattttaagaaagaaagatggatcaacctagtggaagaagtttcatgcaagtattatgtgaaaaatatagtcctgaaaattttccttatcgccgtggcccggggatgggagtccatgtcccagccacacctcagggctctcctatgaaagatcgcctcaacctcccaagtgtactagtgttgaacagctgtggaataacctgtgcaggagatgaaaaagaaattgctgctttctgcgctcatgtgtcggaactagatctttctgacaacaaactcgaagactggcatgaggtcagtaaaattgtgtcaaatgttcctcagttggagtttctaaacctgagttccaaccctctgaatttgtcggttttagaaagaacatgtgctgggtccttctctggggttcgcaaacttgtcctcaacaacagcaaagcttcttgggagacggtccacatgatactacaggagttaccagatttggaggagctcttcctgtgccttaatgactatgaaacagtgtcttgtccttctatttgctgtcattctcttaagctactacatataacagacaataacctccaagactggactgaaatacgaaagttaggagttatgtttccttcactggataccctcgtcctggccaacaatcatttgaatgctattgaggagcctgatgattcattggccaggttgtttcctaatcttcgatccatcagcctccacaagtcaggtttgcagtcctgggaagacattgataaactaaattcatttcccaaactggaagaagtgagattgttaggaattcctcttctgcagccatataccaccgaggagcgaaggaaattggtaatagccagattgccatcagtttccaaacttaatggcagcgttgttactgatggtgaacgagaagattctgagagattttttattcgttactatgtggatgttccacaggaagaagtgccattcag

SEQ ID NO: 1301 - DNA, 357 bp, Homo sapiens
  full length sequence of bloodCirc_06549
aatgtttcatccatttgtggaccaaaagatggagttggtttttatttttaaaaagataatgttaatgatctgataccactacaaatatttacgtgagaagattcatggacttgtcttttggttggactgtcactcatttctgaaagtttcttcagccacaatttctatttgaaaattcaagtatcaaaggataccaggtttagaatggtataatgatgtattttgtctgaggactgcaaattttatagagaccacagttggattccagtgatattctgcaatcaaagtgatttgataaacctaattttgaagcattttatatttataagcgacatcaaaagatgggagaaaaaaatg

SEQ ID NO: 1302 - DNA, 494 bp, Homo sapiens
  full length sequence of bloodCirc_10785
cacttgctctgaaatttggggactgagtacaccaaatacgatagatcagtgggatacaacaggcctttacagcttctctgaacaaaccaggtctcttgatggtcgtctccaggtatcccatcgaaaaggattgccacatgttatatattgccgattatggcgctggcctgatcttcacagtcatcatgaactcaaggcaattgaaaactgcgaatatgcttttaatcttaaaaaggatgaagtatgtgtaaacccttaccactatcagagagttgagacaccagttttgcctccagtattagtgccccgacacaccgagatcctaacagaacttccgcctctggatgactatactcactccattccagaaaacactaacttcccagcaggaattgagccacagagtaattatattccagaaacgccacctcctggatatatcagtgaagatggagaaacaagtgaccaacagttgaatcaaagtatggacacag

SEQ ID NO: 1303 - DNA, 178 bp, Homo sapiens
  full length sequence of bloodCirc_06941
gcccggattgcatttctacaaggcgaaagaaaaggtcaagagaacctgaagaaggacttagtaagaagaataaagatgttagagtatgcattaaaacaagaaagggcaaaatatcacaaattaaaatatggcacggaactgaaccaaggtgacttgaaaatgccaacctttgagtcag

SEQ ID NO: 1304 - DNA, 336 bp, Homo sapiens
  full length sequence of bloodCirc_06310
cttcagaagctgcttaccatggacccaataaagcgaattacctcagaacaggctatgcaggacccctatttcttagaagacccacttcctacatcagacgtttttgccggttgtcaaatcccttacccaaaacgagaatttttaacggaagaagaacctgatgacaaaggagacaaaaagaaccagcagcagcagcagggcaataaccacactaatggaactggccacccagggaatcaagacagcagtcacacacagggacccccgttgaagaaagtgagagttgttcctcctaccactacctcaggtggacttatcatgacctcagactatcag

SEQ ID NO: 1305 - DNA, 261 bp, Homo sapiens
  full length sequence of bloodCirc_09968
cacacacaaaagacatgccatttacatgcgaaacctgtggaaaatcattcaaacgcagtatgtcactcaaggtgcactccttgcagcattctggagagaagccctttagatgcgagaactgtgacgaaaggtttcagtacaagtaccagctacgctcccacatgagcattcatattgggcacaaacagttcatgtgccagtggtgtggcaaggatttcaacatgaagcagtacttcgacgaacacatgaaaacacacactg

SEQ ID NO: 1306 - DNA, 468 bp, Homo sapiens
  full length sequence of bloodCirc_16163
gaaacagtactgctggagcaccctttcagtgctgtgaaacaagaactgcaaagaaaatggattgaagagttgaataagcaaatagaagatgaccgtcaaagaaaaatagaggaaaaaattatatattcaaagggtgaggaacatgacagatgggcaatgcactttgattcattaaagagttatcctggttctcaatctcagctgttctctcagtcaacacacaaacaacctgagtacttctgtgtctctcctgacactcaggagctggctgatgtcagcagtgtttgtacacctacaaccggaagccaggttgaaccttcagaggaggagcatatagcaaaacctattaaggatgtggttatggcaaacagtaagaaaacaaactttctccgttctatgactgctctcttggacccagctcagattgaggaacgagacagacgacgacaaaaacaattagagcatcag

SEQ ID NO: 1307 - DNA, 574 bp, Homo sapiens
  full length sequence of bloodCirc_07694
acatggagattaagtagcttgcccaagatcacccagccagtaaagtggcagagctgaagtaatggattcaggtagttgggttccaacctcttctcagactccctacataatttattcctgccttcaagatagaagatgagggatgtacactattaaaactaaaattgttgcagatttggatatgtgtggtaggtggtataagtcacactataaacttatactggagtcaggtcatccaagacctagggtgatgtgctatggagtattgacttttctatacacagtggacagctgatgaggtttttgagtaaatgactggttttgtatttgaagaaagtgactttagtggcaatatagtggctagagtttattgccacaatagagtggaagagtttattgcagaaatcccactgaaggcaagggcaatgggaatgggatccaggcctggctgaatgctcacatcagcttttctgccctcagacacccactaacaacaagaaagaggccaaatcacaagcaacaagacacatgcggacaaaatggaaaaggagaaaacaattttggaagctcaaag

SEQ ID NO: 1308 - DNA, 350 bp, Homo sapiens
  full length sequence of bloodCirc_02708
acatccacgacagcgatggcagttccagcagcagccaccagagcctcaagagcacagccaaatgggcggcatccctggagaatctgctggaagacccagaaggcgtgaaaagatttagggaatttttaaaaaaggaattcagtgaagaaaatgttttgttttggctagcatgtgaagattttaagaaaatgcaagataagacgcagatgcaggaaaaggcaaaggagatctacatgacctttctgtccagcaaggcctcatcacaggtcaacgtggaggggcagtctcggctcaacgagaagatcctggaagaaccgcaccctctgatgttccagaaactccaggaccag

SEQ ID NO: 1309 - DNA, 410 bp, Homo sapiens
  full length sequence of bloodCirc_05496
atatatctttagaaatgagttgcacaattgagaaggcacttgccgacgctaaagctcttgttgaaagattaagagatcatgacgatgcagcagaatctctgattgagcaaaccacagctctcaacaagcgagtagaagccatgaaacagtatcaggaagaaattcaagaacttaatgaagtcgcgagacatcggccacggtccacgttagttatgggaatccagcaagaaaacagacaaatcagagagttgcaacaagaaaacaaagaattacgtacatctctggaagaacatcagtcggccttggaacttataatgagcaagtaccgagaacaaatgtttagattgctaatggctagcaaaaaagatgatccgggtataataatgaagttaaaagagcagcactccaag

SEQ ID NO: 1310 - DNA, 327 bp, Homo sapiens
  full length sequence of bloodCirc_14614
gatatttttaaacaagctactgaagatagattaacaagtgcaaaggaattgccttatttcgagggtgatttctggcccaatgttctggaagaaagcattaaggaactggaacaggaggaagaagagagaaaacgagaggaaaacaccagcaatgaaagcacagatgtgaccaagggagacagcaaaaatgctaaaaagaagaataataagaaaaccagcaaaaataagagcagcctgagtaggggcaacaagaagaaacccgggatgcccaatgtatctaacgacctctcacagaaactatatgccaccatggagaagcataaagag

SEQ ID NO: 1311 - DNA, 726 bp, Homo sapiens
  full length sequence of bloodCirc_12064
cgttttaccaacgaggatcatttggctgtccataaacataaacatgagatgacactgaaatttggtccagcacgtaatgacagtgtcattgtggctgatcagaccccaacaccaacaagattcttgaaaaactgtgaagaagtgggtttgtttaatgagttggcgagtccatttgagaatgaattcaagaaagcttcagaagatgacattaaaaaaatgcctctagatttatcccctcttgcaacacctatcataagaagcaaaattgaggagccttctgttgtagaaacaactcaccaggatagtcctttacctcacccagagtctactaccagtgatgagaaggaagtaccattggcacaaactgcacagcccacatcagctattgttcgtccagcatcattacaggttcccaatgtgctgcttacaagttctgactcaagtgtaattattcagcaggcagtaccttcaccaacctcaagtactgtaatcacccaggcaccatcctctaacaggccaattgtccctgtaccaggcccatttcctcttctgttacatcttcctaatggacaaaccatgcctgttgctattcctgcatcaattacaagttctaatgtgcatgttccagctgcagtcccactcgttcgaccagtcaccatggtgcctagtgttccaggaatcccaggtccttcctctccccaaccagtacagtcagaagcaaaaatg

SEQ ID NO: 1312 - DNA, 172 bp, Homo sapiens
  full length sequence of bloodCirc_03039
agaaagtccatgaaatggaaaaggagcacttaaataaggttcagactgcaaatgaagttaagcaagctgttgaacagcagatccagagccatagagaaactcatcaaaaacagatcagtagtttgagagatgaagtagaagcaaaagcaaaacttattactgatcttcaaga

SEQ ID NO: 1313 - DNA, 578 bp, Homo sapiens
  full length sequence of bloodCirc_07693
acatggagattaagtagcttgcccaagatcacccagccagtaaagtggcagagctgaagtaatggattcaggtagttgggttccaacctcttctcagactccctacataatttattcctgccttcaagatagaagatgagggatgtacactattaaaactaaaattgttgcagatttggatatgtgtggtaggtggtataagtcacactataaacttatactggagtcaggtcatccaagacctagggtgatgtgctatggagtattgacttttctatacacagtggacagctgatgaggtttttgagtaaatgactggttttgtatttgaagaaagtgactttagtggcaatatagtggctagagtttattgccacaatagagtggaagagtttattgcagaaatcccactgaaggcaagggcaatgggaatgggatccaggcctggctgaatgctcacatcagcttttctgccctcagacacccactaacaacaagaaagaggccaaatcacaagcaacaagacacatgcggacaaaatggaaaaggagaaaacaattttggaagctcaaaggtag

SEQ ID NO: 1314 - DNA, 344 bp, Homo sapiens
  full length sequence of bloodCirc_10271
tgaacacttgtcctgctccttcacctttttcttgcatggagacagcaatgtttgtaccagtgtggaaattaaccaacatcaacctgtataccttctcagtgaagagcatatcacccttgctcaacagtctaatagcccatttcaagttatcttatgcccatttggactaaatggcactctcacaggacaggcattcaagatgtctgattcagctacaaaaaaattaattggtgaatggaaacagttctatcctatctcatgttgcttgaaggagatgtctgaagaaaaacaggaagatatggattgggaagatgattctttagctgcagtagaagttcttgttg

SEQ ID NO: 1315 - DNA, 164 bp, Homo sapiens
  full length sequence of bloodCirc_10970
gaatcaaggcaaaataaagaccttctcgaatgaaaggaaacaaagcgaagtcatgggcagcagtgctactcaacaggaaatactaaaaaaagttcttccgctggaggagagcaacttgggactccaggaatgaaggaaaaccaacagaaatggccaatatctgg

SEQ ID NO: 1316 - DNA, 350 bp, Homo sapiens
  full length sequence of bloodCirc_04710
attcttctgtgtgactcttgcgatagtggataccatactgcctgccttcgccctcctctgatgatcatcccagatggagaatggttctgcccaccttgccaacataaactgctctgtgaaaaattagaggaacagttgcaggatttggatgttgccttaaagaagaaagagcgtgccgaacgaagaaaagaacgcttggtgtatgttggtatcagtattgaaaacatcattcctccacaagagccagacttttctgaagatcaagaagaaaagaaaaaagattcaaaaaaatccaaagcaaacttgcttgaaaggaggtcaacaagaacaaggaaatgtataagctacag

SEQ ID NO: 1317 - DNA, 437 bp, Homo sapiens
  full length sequence of bloodCirc_23217
tgagcagtgaagattcagaagattctgattttcaggaatcaggagttagtgaagaagttagtgaatccgaagatgaacagcggcccagaacaaggtctgcaaagaaagcagagttggaagaaaatcagcggagctataaacagaaaaagaaaaggcgacgtattaaggttcaagaagattcatccagtgaaaacaagagtaattctgaggaagaagaggaggaaaaagaagaggaggaggaagaggaggaggaggaggaagaggaggaggaagatgaaaatgatgattccaagtctcctggaaaaggcagaaagaaaattcggaagattcttaaagatgataaactgagaacagaaacacaaaatgctcttaaggaagaggaagagagacgaaaacgtattgctgagagggagcgtgagcgagaaaaattgagagag

SEQ ID NO: 1318 - DNA, 669 bp, Homo sapiens
  full length sequence of bloodCirc_12082
gacatggatttgattgacatactttggaggcaagatatagatcttggagtaagtcgagaagtatttgacttcagtcagcgacggaaagagtatgagctggaaaaacagaaaaaacttgaaaaggaaagacaagaacaactccaaaaggagcaagagaaagcctttttcgctcagttacaactagatgaagagacaggtgaatttctcccaattcagccagcccagcacatccagtcagaaaccagtggatctgccaactactcccaggttgcccacattcccaaatcagatgctttgtactttgatgactgcatgcagcttttggcgcagacattcccgtttgtagatgacaatgaggtttcttcggctacgtttcagtcacttgttcctgatattcccggtcacatcgagagcccagtcttcattgctactaatcaggctcagtcacctgaaacttctgttgctcaggtagcccctgttgatttagacggtatgcaacaggacattgagcaagtttgggaggagctattatccattcctgagttacagtgtcttaatattgaaaatgacaagctggttgagactaccatggttccaagtccagaagccaaactgacagaagttgacaattatcatttttactcatctataccctcaatggaaaaagaa

SEQ ID NO: 1319 - DNA, 228 bp, Homo sapiens
  full length sequence of bloodCirc_00788
gtttcaacccttcagagaccaagattcgaacacctgatgggaaagtgtggcaggaggctgagtttcaaaacatgagtagagaactgtatcgagatttagcacttcactttgcagatgatatttctataaaggagaaacctgctgaaaaaagtaaagagaagaaagtagtcaagccagtacgaaaagtccaaaaagtagcacagttatcaagtacagaatgcagaacag

SEQ ID NO: 1320 - DNA, 163 bp, Homo sapiens
  full length sequence of bloodCirc_05414
catccacccaacccaccagtatcaccaggaaaaactgtaaatgatgtcaacagcaataataacatgtcttacagaaatgcaggcacagtgagacagatgctggagtccaaaagaaatgtaagcgagagtgcaccaccatcctttcaaactcctgtgaatacag

SEQ ID NO: 1321 - DNA, 232 bp, Homo sapiens
  full length sequence of bloodCirc_20442
gtagtatcttccccagcagatgttgctgaaaaagctgacagaattattacaatgctgcccaccagtatcaatgcaatagaagcttattccggagcaaatgggattctaaaaaaagtgaagaagggctcattattaatagattccagcactattgatcctgcagtttcaaaagaattggccaaagaagttgagaaaatgggagcagttttcatggatgcccctgtttctggtg

SEQ ID NO: 1322 - DNA, 184 bp, Homo sapiens
  full length sequence of bloodCirc_21415
atcctgtctacctttcatgaccaactacagttttcattgcaacgtctgccatcacagtgggaatacctatttcctccggaagcaagcaaacttgaaggaaatgtgccttagtgctttggccaacctgacatggcagtcccgaacacaggatgaacatccgaagacaatgttctccaaagataag

SEQ ID NO: 1323 - DNA, 429 bp, Homo sapiens
  full length sequence of bloodCirc_16141
gaaaggaaacagattcattgtctgtctgaggatgagttaagttcttctacaagttcaactgataagtcagatggggattacggggaagggaaaggtcagacaaatgaaattaatgccttggtacaattgatgactcagaccctgaaactggattctaaagagagctgtgaagatgtcccggtagcaaacccagtgtcagaattcaaacttcatcggaaatatcgggacacactgatacttcatgggaaggttgcagaagaggcagaggaaatccattttaaagagctaccttcagctattatgccaggttctgaaaagatcaggagactagttgaagtcttgagaactgatgtaattcgtggcctgggagttcagcttttagagcaggtgtatgatcttttggaggaggaggatgaatttgatagagag

SEQ ID NO: 1324 - DNA, 174 bp, Homo sapiens
  full length sequence of bloodCirc_15039
gttgttcttttaaagaattattgaagacgaaggtttttttctttttatttttttaatggctttacagaatcttaaatagaatacagtttgacatgacggcaaaaaatgttggtttgacttccacaaatgcagaagtaagaggatttatagatcagaatctcagtccaacaaaag

SEQ ID NO: 1325 - DNA, 215 bp, Homo sapiens
  full length sequence of bloodCirc_01723
gattatatgcgtcaggcaggagaagtgacttatgcagatgctcacaagggacgcaaaaatgaaggggtgattgaatttgtatcttattctgatatgaaaagagctttggaaaagttggatggaactgaagtcaatgggagaaaaatcagattagttgaagacaagccaggttccagacgacgccggtcctactccagaagccggagtcattcaag

SEQ ID NO: 1326 - DNA, 29427 bp, Homo sapiens
  full length sequence of bloodCirc_12722
atctatccatactaatggaaatgtaactggaactgactctgatgataaaatcaaggaccatcaagcaagatcatgcagtaggcaactttgcttccaaaagaagttaccaacatttagaatttctacttattctgaggtatttgagacacaattttactttagttttgactccttagtagtcattttctagtgttgatttctagatataggtttggtgagtttaaaagtacttatatgttagaatgcttagctcttagagaagagttcacttccctcctttcccactatactcccaaagaaaccaactgagaaaagatccagattttttttccaaaagcctgcagtactcagtattccaatgtggtctcacaaccaagtactaaccaggcccgactgtgctttgcttttgagatcaggtgtgttcagggtggtatggctgtagacaagattttaaagggatatatttattaaaattaggaaagcatgtcaattataagagataaattaagtgtagattaagtctcagtaactatattagaagaactggaataaataaatgtcaatttaataattattttatttacattatgacccctgagaaaaggaactgaatgcagcactctgagtccacctgcaagatgtcagagaccttactgatcatcctttagatggtttgaaacctttcttgcctttcctcctaaatttattgttaaggattttctattcaccagtatgtgtcactgttactccccataagctgtccctgtaggacctttgggatctaatgaattacttgggccagaaaaccaagatatttaactaaagaatcaggtgacacttccaaaacatggggtggatccccacttgaaagactacataagacaaataaaacaaaaaagatatataatgtcaacagaaagcaaaaacaaaaatagttctgttttcacatgaattccaaacaggtagagtgagttaggtgtttatttaaaaacaaaatattttttattttaattatatttttccaaataggcagaaagtatgctaagtattttaggggacaggtcagagtttgttgatttctctgaatatgttacagagttttgtaaattaatattttgctagaatatagagaaagtaaaacctgagaaaaatgtaaatatgtatcacttattactaggattcttaactttgttctgttttagaagaagactatgtaaagcataaattccaaaaataataagaattcatgatattgggaatcctaatgtcatgggatccttggggtgtcctttcactggccagaaacttctgtggctggtggcgcctttgcctgagttttgcttgggcccagtgggcccactcagcctggcaggctgtgtgcagctcacactactggcctggatcccatgcctgccaagggcgagcggagcagcagggggtgtgtgagcaagcgagtgtggggtctggccactgtgcacagccaggcacgctggctgtggcggggcaggcagctccaggcatcagcacgggcgctcactccctgcaagctgtgtctggactaggtgtatcacaagcagcttccctggctggcaccagggaatgcagtggccctcagaagcttggagatgccaggaactgcagagctccaaagagggtgtcactgccctggctcaaggaactcctaggtctgggcttcctgaaggctgcagctcttctctcctcttctcacccacaacgtggcaagcaaggagcatgtttcagtcctgtttgtgttacaactttttcaatcctgccatttgatatgtcccgagttcttgtcccacacccaggaagaataaggtacacgggtaaatggagggtgagcaaagggaacaggagctttattgagctatagaacacctcagaggagacttgcaataggtagctcctttctgcagccagggtgtcccgatgagtgctcagctttcagcagagaggagaccatggagttggagtgggtagctcctctccgcagctggtcatcccatcctctcctcagctttcagcagagaggagaccctggagtgggcagctcttctccacaactggtagttccattgtgtgctcagctttcagcagagaggagaccctggagtgggtagctcctctccacagctggtcatcctatcctctcctcgaatttggctgaatccagggtttttatgggcttcccaggggctgaagtgcatgctgattggttcatgagtgggcccagaaaaagcactgtaagtttccattccagtccacaggactggcagcttggccccaggcttcaagccttctccggtttgaaggtgaggcttcaccagggacctgcccctttctgcccagaagtctatctgcctcctaccattgttcatggtgcccaggctgttcctgctgaggggcacctgcaggccagcatcgagtctctccttgtcctctctcacccgtgctcgttggcacccacccagctgggttgcaacagtgcccggccttggcctcaactttgctccgagattggagcaggcgctgggagcaggaagagaccaggcagtgggagtaggcacttctgagcctgcaggggcatggggggccttcctgggtccctaagagtgcagagaagtctgggtccacagtggtggatgggcagttgcagctgcacccaggagggcgggccttctgcctgctcccagcccctgctggctcagtggagcacacagcccttcctacacttaccccactgcagctgctctagatgggccgctgctgccatcactaagactgcctcagctacaataaatggattatctcctgaaaggggttagtgtaattgagcaatttttgctgaagaaaaattatctcaaatcaagtagcagatgaaaaagaggttactttgatgataagttttaaaacgtccctggcaattagtagatgtattgtacttttctttgttttcttgttggcgtttgaactcaaatagtaatgatgattaaatatatagttcgtcttagtaccagagccattttacttgtttttttaggtatatcttttcttcttactttcacttaggaacattagtggaatgcccaagctttgtaaagaatgagtctagatatggggaagaatataaattattctgtaacttcattataaatggaattgaagatgtcttttattcagaatggttactcttgggctaggaagactagatacacccatctgaagccatttatgtgcagtcatagactgtgtacatcaagtcaaaatctagaatccctttctaagtaatatacttaagttctatattcagaccttaacaaaagtaaagattagggaataggaagttctcatcaattgaaattgctaattggttgtataaaagtgccatatagcctaaattaggttgcttaaatttttaaattaggaatttcttgtttatcaatttctttttttaagacagtctcattttgttgcccaggctagagtgtgtggtggcatgatcttggctcactgcaacctccgcctcctgggttcaagcaattctcctcctccccagtagctgggattacaggtgtgcacaaccacacctggctaatttttgtatttttagtagagacggagtttcaccatattggccaggctggtcttgaactcctgacctcaagtgatctgcccaccttggcctcccgaagtgctgggattacaggcatgagccactgcacctggccatttatcaatttcttatatctcctcactgtttttcaaatgttcacagagtgatatcccctattcatatttgtcattttccattttgaaaatgaagaaaagtgaaaaatctcacaaatttgtgcttggaagagttttacatttgaacttcagatttaaagaatatgggattttgttgttttgggggataagagcaaaatcaatacttgagacgggaagttaaggccctagaacatttgcaaagttatatgtcctggtttacagtttacattaagttgaaatggtacctttttaaaatgttttgtctggactcagtaaaacatttgaaagcaaattttggccagttatattaagggaatggatattccctgctacagttttttttctgtgctgtgatggaaagagcagaagctttactctcatgctaccttgggagaattgaagtaatatttcttagtttccttttctgtaagaattaatttttagaggtgatgaagaatgaaatgtgtgtgaaataatgaaaaataatgctttttagtgtgaaattaatgaatgttgttgctaagacagagaggtccacattactgtatcattcagaggtatctttttcataggaaaaagcaggtctactcactactattgagaagcttgtaaaaccagtttcaaagttaatagcaaatattatgcttgcagagaaagtaaaatgagcttttggcacaaattctttatcaaagacataccatctggaaaagcaattactgtcatgtacccatgccagtattttgtttttcagctggatgaaagcactgatgtacagaggatatactagtgcttgatacaggtgtgttactgtttatcactgaaaaatcactatagcagaagagttttatgttttgttattggtctgttgtttttttaagccattatagcctagaaaagcttctttgtttccttctgatcaaagcaccaacaactatagctgcaggaaatggtctacttgctttttaagtaaaagaagttgcagcaggatatcaattcatatcccacttttttcagagaggagaattggcatttagtaatgtgactttttgtcatgatttagtgttgaagaaaatagtaaaacttgtggatgtaagcagttttggccactagagccacctcttttcagagttttatgacaaaatagcagcaatagtattttgctttttcacagtgatatgttagctgtataggaggaaagggcttacatgtttgttaattagttttttagtaaaatgagataaagatatacttgctactgatattgtatgatttcaagggacataacttacctagttatgaaatacctgtggtatttcaaatagtctgaacttacaactttatattcatgatatcatgaatttcaatgttaaggatgaaatatgaggattttgtaaaagtctgaattacggtgcaaaataattcaacctctgagagtttgaccgtatcctcaaacttgttggttttattaatttttttttttttttttttttttttttactgaatttgggctaggtacggtagctcaggcctgtaatcctagcattttgggaggcctaggtgagtggatcacaaggtcaggagttcaagaccaacctggccaatgtggtgaaaccacgtctctactaaaaatacaaaaattagctgggtgcagtggcaggcgcccgtaatcccagctacttgggaggccgaggcaggagaatcgcttgaaccctgggggcggaggttgcagtgagccaagatcgcgccactgcactccagtctgggcaacagagtgatactccgtctgaaaaaaaaaaaagaaaaaaaaagaatttgtattatacatgtctaaaaaccacatccaaattttgaaatagaacatggaaaaatacttcccagagtcaaaatgcaagcagaaagtagattaggagtccttttttcaatttctcaagttgaagcacttaatttccagctttaagtggtatatacttttttttttttttttttttagcattcaaaggaatgctgaaattaaaaatcagtgagaagtcttgctatataatttctgggtccacgttcaatcataatatccaggctgtataatgccactgatttatgatttataattagagatttttatttactaaaaataaagaacaagaaagaaaccagctgaatatgaaaattggtttatggttcaatctgattccagatgtgggtgtttgaacatcttgcagtgaagttatcaaacactaatagggttgttacaactcaggtgcttaattgaatgggctctggttggccaaagaagatgagacaatctgagcatcagtaagcattaactgcaatataatgaatcatatcaaatatatttaaatccgtgagttcataatgatacttcaagaactcattagttttcttcagagtatgctaaggagccaactatgctttagagcaaccaaatagttgctgagaggaagtttcttttctcagatagaataaaaacatcaccattttctaatgaattcctgaacctaagcaaagatcatgaatggctgctaactgcacgggcagaaacggacattagctttctcttaatgaaagttcacagtgctgcccatgaagtattcttgccaaaaaagttgaacccgaatgtgatcaagtctctagctctaccagtttacaggaaacacagaagacagagaaacacattaagtgataccatgtgaatgcagttagcaaaatataggttatggggaactcttagagacatatgtcttgtttttcaacgagcaaattgtagggagaaaaaagagaaacggaggaggaaaccgtagattaacagcagtgcctggactttatttgagtctaaattttaataaacatttatgaaatagggaaattttaacactgacaagatatttgatattaaagaattattgttaatttttaggtgagatgatagtatgtagttatgtattttttaaaagcccttaccttttagcgatacataatgaaatattgatgtaacgaaagatatgcctgggctcctgcttccttactatctcgagtacaggggaggttgtgggtgaggattaagtaagattggccattagttgatcgtgcaactagacacttgtgatttgggggacagtgcgtgagggggtgggagtaattcttgataatattccctaaactttttggaaaaattccataggaaaaaggtccaaaaatacagttgaattatgtatatttagcaacctgctcagttatatttctgataatttcttgagtctgctgagtgtactatatagaaaatcctattgcctgcaagggacagttttactgtatagtgcttactgtttaccaggctctcttctcagcactttatacatatttacccattagatcctcacaagaatgcctgtgaagtagacattaacttgcaaaggttacccaggtgctatgttttagagctgggatttgtatccaggcattctagccctagagtctatgcatctctagtttttgtatctctctttataactttttatttttaatccctctactccagtctttcttttgtttctcttagtgcgctggccaaggagttcaccttttaaagaccagtttttatgtataattttgattttgtaagttatcttaatacatagggaatccagagtccagctgactttgctcctttacaaatacaaggtacttagtaaggggctagaattagcttactgtgtatccagaaaccaaaggatcaagtgtattataacagtgttcagtattttttattatatttctctcctgatctgtaagcagttcattcatggctcattttacttttgattacttgattttattggtattacttgctgaatttctttgtgatacttagataaaattactccttcctccccttaactcctacacgttaggtaattaccccctgcttgactttacatagattacatgagataagcaaagcacttagtacacagtttagcacataatatgtatctagtaaatacgctttttggtttaagagacagccacttcataattttgttcaaaaattgttctttactctttaggtaacttttgaaatggggagggaagaatatggcttagtcactttaagaagtcctaggcctgggacaggtgggtaaaacttgataatgtgttagggtggtttaatgagtaatctctgtgttctctgcaaggaactttttaatgataggctctgagtttgagaaagattactgacttgagttggtttccaaaagaatacttgtttattgggggtgaagtgggaacaatttagggaaaatgtgacctgtcccaacttcttgagtgttttggttcctctttagccaattgcaaaggacgttatgacatagtaggatactacaattcatgaaaggaggcacatagcctctagtaagaaagaaaacttttgatttcattcatatgagagaaggctcacaattacagataactttttcgtgaagattgtggaaggtgactctgaagacctgggatagctagttaaaagttatggtatttttctgtactccatcacctccctctctccacccgagctgcacctgctattttacataggagtgtactgaagcaaccttttaacatatctttaattttatttttgaaaatgatgttaaagtatttggaaactgaagactgtggccacacaaagtatcttttattttccaaaggccagttattattattgagtggcatagctattgaaattgcatcaccaattacttgactgtgttaaagaaagggatttgcttttggggggcccgtaggttattgataagagataaaacatatttttttgaataacaaatgtgtatgacaaacccactctcgtatctaatcatgaaatgaaatgctttccaatgaaatctggatgctctggaaaccaaaaggtgatatataagaggaagcatagttgagaggtactcaatttaacttttgttatcagttacttggtgaaggtattgaaatgtttattgctttgaagatgatcttaaatgaggaggcatagttaatgtggtctatatagaatgtgagatgaagtgaatttaagagaaaagaaagcagatatgagaaaaacaaaaatgtaagaaaatagctaatatttaatgattgctgcgtatcaagtgctgtgatagatactttatacatattttcagatactgtcccaataaccatttaggtgtaagttactaaatagctattaaagtttttgagaatttttaacatttcttgaaattagaaattccttacattattaagaaacactctttggttgacctttgcaagcccagcaaacccagagttagataaaggtacaaaatcgagaatctctgtccttactcttcatattgtatggatgcatttaatgctagtaaaaattgtaagcctgaataaatgtagtgtaaaacctgcattgatgatttggggtttatttagttatttatgaagcttatatctaaatttgggattaagttgatttttccagttttccagtcaatgcaacattttaaaaaatcaattttagattaaaccacaaaggaaaatctcagtaaattccagaaaagctgaaactacatatgtccattctctctgactgcagcagaaatttaaaatatacaactttaaccatttggacaaatcaaacaaaaaaattgcttaaataaataccgggtcaaacaggagatcaaatgtacaataagtggtcatttagcacctgaaatgagattcaggctaagactcatactgtgcttagaagtagattaatagtctttgttaatgaatgaaataaatgtactaagcactaaaccttagaatttagtaaaacaaacggactcaacaaaataaatgcctaggagaaaggaaagaaattaataagataaaagcagaaataggtgaattaaaaaacagaaaccacagaaatgaaaaatctaaaagctacttcttagggttgaaaaacaaaatagaaaaatatctgacaaatcttacaaaggaaaagatggaaaaccaaaattaagtttgtaaagcagatataagaatagaaaagatgtttaaaaaatagtaagcgaatactatttattaactctaagctgatttatttgaaatgaattatggaacacccaagctgatttaagaaaagttggtctggagctacatccagctagctccagaaccaatttttgccagttaattctttttagttttcaaggaacatataattcctatggtgagaactattttagagattatagaaaagatggaaatatgcccaattaatattataaaatcagtatgacttttttaatggttcagtgcagtaaaactcttttgggggaggttactgcttttttttagtttctattgtaagcacagatttttcttgaaattaaaacaattgagaaaagaaaaaacaaccagaaactcaaaacttaaagatattgtttatatttattaacgtatttaccattgctggcactctcctttgtgtagatcaaaatttggacctgataatctttttcttctgcctaaaaatcatttctttaagtgcaaaatctgctgctaatggatttttctcagctgttgtctgaaaacatttccaccttcattttgaaatatattttagtagggtacagaatttgaggttgacaggttcccccccttccaatcttgcgccattgttttcttatttgtataatttctgatgagaagtttgctctcatgcatacctttgtttttctgtacacaatcttttttcctcttctggcagtctttaacatttctttccccccaatcactggttttcaacaatttgattatgataattgtcggtgtgattttctttgtttatcctgcttggattttgttgagcctcttatgaatctgtaagtttctggttttgatagcatttgaaaaaattatgctcattatttcttcaagtatgttttttatctttttttttcctctgttttttggacctcagttacattgatcttagcttgtttgtgtgttgctgcaaatcagtggtattcgctttcattatttttgtatttttctcctttgtgcttcattttggaaatcttctattgctatatctttaagttaactaagtgttaaatctgctgtcctatgcagtgtatttttcatttcagattttgtatttttaatttctagaagctccaattgggcctaaaaacagtcttgcatttctgtgttcaacacttccatatctttttctgctttcttgaatgtattgagaatatgtataactcttttggcatctctgtttgctaagttctctgtcagttctgggtctgtttttattgatattctcctggttataggtcatatttacatgtctggtaaattttgattgtcagacattgtaaatttcacgttactggatgctaggttttgtgataaagaggccattttttttctttttctttttttttttttttgagacagagtctcgctctgtcacccaggctggcatgcagtggtgcaatcttggctcactgcaacctccacctcccgggttcacgccattctcctgcctcagcctcctgagtagctgggactacaggtgcctgccaccatgctcagctaattttttgtatttttagtagagacggggtttcactgtgttagccaggatggtctcgatctcctgacctcatgatccgcccacctgggcctcccaaagtgctgggattacaggtgtgagccaccgctctcggccgaagaggccattcttttaagtaatgttggtctaagttttggcatgcagttaaattttttttgatgccctttaagacttgttttgttttaaggaggctttgttagggtgagtctggagcagtgagtagacttttctcctagagctaatttagaagttgatacccttctgaggactttacatgatacttcatggattgggaggtctttttactctaccctattggaatacaaactattcatagccttgtgtgagagtttcagaaattatttggcctttgtttttttttttttgttttttgtttttttttttttttttttttgtttgctagtcctttctccaacctcaggtggtttccttccacacaggacatatcagcactctcctaacagcttgtgggaactcctttgcatgtctccaaggcactgtctctgtatgtagtttctttctgttaggctagtccacaaattctggctgccttggccccactaagtgtcaatctttgtgacctcaactctttgagactgtaaggttctgtttaagccccatctcccttctttacactacatcctgtaaattgcttcaagggtgtgaggtcaggcaaatgtaggactcacatcattttttcatcttttctcaggaatcccactcctgctctgactggtatctaatatctaaaagccattgtttcatctgttttatccagttttctggtagtataaactgggacaacaaatctaatctctgttactccatcatggctatttgtggaaattcttgagtaacttctcctcctcctttttctgtggattaagatgtgggcctaagttaaagaagttaagaaacaagttggtttgatctcagtgtttcaggtgtttggcttgtcagtaactgaggcagaagagtccctagttgtctgtggtccaaactctttgatgatgataaacagatgatttcacttcatgcattctcctctcagtttcagtgtcgggtacctactgcagtagtagggtagttgatcaagaattatggtattctgagtcttggtcagttgccacatagtttaaataagttcttagtacttttaactgaattaagacccatacttatttgctttttctcagctatttctgtttgctggtatttacttttaattttatgagttttttctttgtttctgttagttgctagtttatctaactggttgtcatttttcagctggattatattttctttatatattttgtatttttctgcatcacagtaatgtttaggctcttcaaagtgtttgaccttcatgcattatatctttagttttgttatctgtttttctaatcttgcttttctctactcaaatgaatgagtgaataaattagtaatcgaataaatgtagacacatatactcacacacaaagtgcattttctcaattcaaacactattaattgtgacatatgccacagatttaatatattttcatgaaaaaagaaacattaagtttattttttaaatccttaaaggtttactgacagaagtatacatttatccatataacttctacctcatctttttgggaatcataagattgagtgtaatcgtcttccaaattctgacatgctgcttttccttacctgtgcttgctttcttggtctctttacacattatgattgccagtataattttgagtcatatggaaatgtgtagaatttaactgcttttctttttggttgaactcatggtttcagtttttttatagataagccgtgaattaaataacttcctttttgagtcagctggaaacttttgacagattgatatccagcacttgggtgatagtactttgtaaaatgcaaattagtcacaccagtgtcttccagctctgataattctatgatctgttttgagagattgtgcagtttttactgcctttaattgcccttgcttggcttgcaacagacaacttttgcattacaatagctttttatttcagtgctttgacacggttcagtctctctgaaaacattttcaagcaagttatgctttcaaatttaagttaaaattcaaccttatctgagtttacctgtgcagttaactcagctgtggtcatggttggattgacagataccttctatgggaatgtattttccataggtttacacatgggtaggcagtgacatacctcacaacgtactcttttgcttggctactggcaaatttttttggattttatttctgatacttctagtttcagaaacctgaaaatattattttaagaaaaacaagtatctttagtattaagaaaatctagtttagtaatttagtgtacagtgagcaagcataaaatctgtcagtggtagaattgtttaataagttttgggatgatcagatggcagttaggaaagttcatgtagagccttttcatatgcaaatgttatggttgacctttttaaattggaaaaactcgtgaaactgtgcaaagaatagtaatcttctaaagtaagaagactgtaaagaagtgattataaaaactaagcacatctgtatgaagaaaaccaacacaattaaaactaaaaagaaaaataacaaagtggaaaacacaaatatgaccttacatgattactgtattatgaaaatatttacaacactaagattccagtaactacattaataaaggacatgcccattagctcttaaggaaaagagttcaacatcattggtagttaaaaacaatagtgaataactttttttatacttactgagtaaccataataaagaagtccatagggaatcaagtactcatgcattgcttttggaattggaataactcatttgagaggtagtatggtagtatatatcttaaaagccataaacatatctaagggcatggattaatgatcttactcttgggaattgaccctaagtaaataaagaataaaaaaaagctatattagagctgcattcacaatactattacttatcatagtaaaagctgaagacaacctaattggccaacagtgaaaattttgatatattatgcaaaagtaatacctgaatagttcatatccattacatataagtgttagcactgtgacaactgggactgtatctttttttgttctctgctgtaaaaccagtgcttagaaaagcttggcatgtggtgggtactgaaaaattattagtagtatttttttttaatgaacaacagaataatgttgagttaaaaaagaatttaaaacatacacatacagaacctgttctcagataccttaatgagtaagggggatgggcaacaagttggttgatgaagagttcttagaggaatttgaactggggtttgcaagtttagtagaatatggattctcttgggagccaggaggtgggagtgctactccaggaagagggatttatctgaggaaagacctgacagtaggaattgactggagaataaggcaggaggttaggcatatataaggacagaattctgagtggacttgtagctaacgaggtaggactttattcttctgtatgagaagtcgttgatgctttttcaacagagtttgatattgaaagagctatataattcaaggagttaatctacctttgccatataagacaggttcactcagttaaactagaggtccccaaaccctgatgagagactgttggagttcatggttaccaaggtagctagagcttgagtggcgaagacagtcacagagaagtgagcctataagtctgaatcatgtttcccttaagagttgtcacagcttagtaagcaacacaaaccaataagcaggaaagttgagcagaaagtggctgctaacaaactaagctcagcagagttttcagcagtttcatggtgctagagatagaggcgtcctggtaaacaccctaggttgaacaactgcatcctagcagtaagagtgaaccaggagtagactaggtcttaataagattgaaaacaagcttcaagttagcttgatctctgattttattagctcccgctgccaaccagaaagtaaagaaactcttcagttgaagataaatttcacatcctttatggtttttaatgatacagtgtttgacattgagtccccagattccagacatgccaagaaccagaacaagagaaaaaacagatgcaaaaatagacacagatgatcaggtgtggacgtcagtaaaaaatgttgtgccacttctttcatttctcctttgtttctgatgagatgtctgctgtcatttgaattattttctcttataggtaaattatcatttctctcttactgtttttattacactttctgtgtctttagctttcagaagtttaactatgatatgctttaatgtggattgctttgggtttatcctgtttatggttcactcggcttcttgaatctgtaaatttatgtgttttgccaaacatggaaaattgtctggtttttttcttagagcactttttcagcccagcccactttcttctctccttgttggattccatggcagaaggtagatcttttgttagagcttgatcttttgttagcgttagatcttttgttaggtcttgaggctctaattatttgttttcaggctattttttctctgttgtttagactggatagtatctattgttctatattttggttcagtgattctttcctctgtcccttccattctactgttgcatccatccattacatcttttgttttacctatttttcagttctgaaatttccatttggttcttctttatatcttttctttctttgcagtatgttctttatatcttgctttgtttttgagactctcagttattttgttgtttcaagtatgtctgtaatggctccttgagtcatttttgtgacagctgcttaaacatgtttttcagataattttaacacctccatcatcttggtattggcatctgtggattgccttttttcattctgtttgagatattcctggatcttggtatgatgagtgatttttatttgatacctggacatttttagtattacatgctgacactctgggtcttatttaaatgttctgatttagttggctttctctggccctgcccccgcatgagaaggagggaagcctcattactttcctgtggggatacaagtccaggttctctactttgcctctcttgacactcaatttagggagagattctttgttactgctggtcatggatgggagttcttgcccacattgatttctccctggctgggaggggcaggaatgtgtcattatggttccccacatatcctccacagggtgatagtctctttactgtgtgatggtgaaaggcctgactctgctaggcttctccaaaaacagcctgtggcagaaagagagaagggtaccttgttactactaggtgaaggtccaagctctccatgtggtcttcactgacactgtggaaaaggaggtctcattatcacgtggcagggactggctccctactggccttctctgacatcaccattgtggggagaattgagtgccttattacagccggaggagagcagacatctaggctccctacttcacctttgctggtgggagtgggagctacaggcacagagttgttttttacttctgtttttgtgtttttggtgatgtttggctaggtataatgtgctctgtctggattgtctctttccttattctttgcctggagagaacaggattttgttttgtttggctggttggttttggggggagtctgggcctatgggttttttcgggctgccagcttcttcagctccaaggtgataacatgtaacagaaacagaaaactacaggccaatattcctgataaacacagatgcaaaaatcctcaatgaaatactagcaaactgaatccaacagcacatcaaaaagatcacacaccatgcctaagtgggatttatcctaggaatggttcaacatatgcaaatcaataaaagtgattcatcatatcaacagaatgaagtacaaaatcatatgatcacccaaaagatgtagaaaaaatcatttgataaaatttaacatcccttcatgctaaatctctcaacaaattagacatagaaggaatatatctcaatacagttaaaggccatatatgacaaacccacagctaacattatactgaatggggaaaagttgaaagtttttcctttaaggaaaggaataaggcaaggatgcccactttcatcactcttattcaacatagtactggaagtcttagccagagcaaataggcaagagaaggaaatagaaggcatctacattggaaaagaggaagtcaaattgtctctgtttgcagatgacatgatcttatatatagaaaaacctagaaactccactttttttaatcagttttaaaattgataaacgaattcagtaaagttgtaggatacaaaatcaacatacaaaaatcagtagcatttctatatatcagtaatgaactagcctggaaaagaaagcaattctatttacaataaccacaaaaaaaccccacctaggaataaatttaaccaaggaggtgaaatatctctacaataaaaactacaaaacactgatgaaataaattgaagaggtcctacaaaaaatggaaacatatttcatgttcatggatcaacaaagagctaatattgtcaaaatgaccatactacccaaagcaatgtacagattcaacacaagccctatcaaaataccaatgacattcttcacaaagatagaaaaaaagatcctaaaatttgtatgaaaccacagacgaccccaaataggcaaagaattcctgaggggtgggagaggaccttggaggcatcacattatctgacttcaaaatatactgcaaagcagtagtaacccaaacagcatgcactggcataaaaacagacacatagaccaatggagcagaagagaacccagaaataaatctacatatttatagccaactgatttttaacagaggcaccaagaacatacattcgggaaaagacaagcctcttcaataaatggggctgggaaaactggatatgcagaagaatgaaactagaccctcatctctcatcgtatacaaaaatcaactccaaatggtttaagacttaaatgtaaaatctgaaatgcttcaggatatttatctgggcaaagatttcctggctaagacttcaaatgcacaggtgcaacaaaagcaacaatagacaaatggtattatatcaagctaaaaaacctcacagcagagaaaacaatcaacagggtaaagagacgacctgaagaatgggagaaaatatttgcaaactattcttctgataagagattaatatcaaaaataagtaagaaactcaacagcaaaaagccaataattcagttaataaataggctaatgatctgactagacatttctcaaaaggaatatgcaaaaggccaacaaatatatggaaaaaatattaaacttcagtaatcattagggaaatgaaaatcaaaaccataatgaggattatttcacctcagaatggctattatcaacaagacaaaaaataaatgctggcaaggatgtggaggaaagggcactcatacactatttgtaggaatataaattagaaccaccattatgcaaaccagtgtggatactcctcaaaactaaaaatataactgccatgtgtttcagcaatcccactactaggtatttacccaacataaaggataacagtatgtcgaagagatatctatattcccatatttattgcagcatatcacagtaaccaagatacggaatcaacctaaatatctatcaacagatgaatggataaagaaaatatgatatatatacagaatggaatactattcagccataaagaagaatgaaatcctgtcatttggagcaatgtggatgaacctggaggactgtatattaagttaaataagtcagacacagaaagacaaatatagcacattttcactcatattgtgggagctaaaaaaatttgagcacgtataagtagagagataattgtggttaataaaggcaggaaggataatcgggaggcaggtattgggagaggttggataacagatacaaaattataggttagataagaataagttctggtgttctgtagcaatgtagggtgactatcattaacaagaatttagtttgtatctttaaatatctagaagagaggattttgaatgttcctaacacaaagatgatgaatgtttaaggtgattgatatgccattaccctgatttgattattaaacattctatatatgtattgaaatatcaccgtaccccataaatatagttactaaatgtcaattttttaaaaagctattatttttcaaatgataaaaaagaagtattttgtagaatgttaattatctatattccattttattaaaatatatacaattttgtttttgtttgcttcaagagaaatgtcccagtgtagtttatatattaattatgcatatcttaatgaattcagaatagtactttaaatatattaagtttatttactgctccccccacccattttccaaagtagactgcattaatttcatgtgattgatccaagtagatccaattgattgacttactgttttcctaatttcaggttccagttacagctatatcagagaatgagttaatctcctcagaaatcactaaatactactctgaggggcttagaaattaacagggtaagttgaatatcatcttaaatactatctggatttttatagtgaattcctaatttgggcctatagtgtgtcaggcaacagttgggcactgggaagaaaattccttctcttattttccatgcctgtagtggttttcagttttcttttggatcagggcccctttgagagtctgcttaaagctgtgtagatcttttcacaaacattcacacatgttcagtcagagtttgaagatcttcgaaaacttcctaaagttcacagaccattgggcaaccctgtgctttgcagtatttcagacgtttttacaggctttgtttctcttttaaatattacaactctatgaattagtgactgatattgatattttacattgaagaaaccggtgttcaaaatggtatgtgacttttcctgtaatgcagctgtcaaatgtgaggctagaattgaagactttcccaaattttaataatactgttggctttttttaaggttctttcttcttaatatgtcaaattgctccttagtaagattgtgtcagcctttcctcattgtcagcaagtgagcatgcctgcttcaccacattatcccattgggtgttcccccaccctagtgtttgctaaattggcatgtagataattgcatttcattttaatttgtttctttgttgtatttagagttctctatccacttatccattggagtcttaccaatttttgtagcattatatatgaattttgaatatattaagaatatttgtcatgttttgtgcaaatacatttaccctttctgtttgcctttttactttgtgattttttttatgtatagaagttttgaaatgtttaagtattcagatctactttttcctctacattttttctctttttttagtgtagaaatttccaaatgcttcatacatctcaatgaatgcagacacattcacagattttttttttaacataatggcaatctaaaagattaaaaaaggaatgccacttaagttacagatttttgacttccttttgtcatatgtttattggctattggtctttcgtcttctttaaatatttttaagtatttaatctttcataatttttataaatgatatgtagaaatctagattattagttctgatagcatttagtaaatgtttcatttttaccaagatttcaaagtatagtttacccaatgtaagattttcatatacacgtatatttctttgtctctattaatgttcctttgatctaattatctgtcacagcataattatgatgtatttttaatgttattgtagctttaaagtcctcttttattagtttttcaaaactgttttattctttgatatttttccaaattaacttgagaatatattcatcaaattaaaaagtaaacatatgaaggatttttaattacgattgcattgagttaaagattcatttggggccaggggcggtggctcacgcctgtaatcccatcactttgggaggctgaggcgggtggatcacctgagctcaggagttggagaccagcctgggcaacatggaaaaaacccgcctctactaaaaatacaaaacattagctgggcgtggtggcgggctcctgtagtcccagctactcagggggctgaggcaggagaatggtgtgaacccaggaggcggagcttgcaaagagccgatatcgtgccactgcacttcagcctgggcgacagagcaagactcggtctcaaaaaaaaaaaaaaaaaaaaaaaaaaattagctgggccggtgatgtgcgcctgtggtcccagctacttgggtggctgaggtgtgagaattgcttgaggctttttgtttgtttgtttgtttgtttgtttaagacaaaaatcttcctctcttgctcaggctggagtgcagtggcatgatctgggctcactgcagcatctacccatcaggctcaagggattctcccagctcagccttcctagcagctgggaccgcaggtgcacagtggcacaatctcagctcactgcaacttctgcctccatagctcttccacctcagccccagagtatgcccagctaatttttgttttttgtttttgtttttgtatagacagggtttcaccacattgccaaggctgctctcaaactctaggctcaggcagtctgcctgccttggcctcccaaagtgttgggattacaggcgtgagccaccatgcctggccagcttgctatacttctttatgttttttctacacatatgcaacttggaattagatctctgtcctctcagagactttccttatgctgtctggctcccaggagcctcttttcctagtcctttcactagtggcaggggttattctttctcttagagtcttagtgtcaccctcccccactgttttgccccagagaaatacatagtgaagattcttcccatattcttcctactaccctggaccctttcccgtttctcaggacagaaggacaggtttctcttaggctttcagatgtgctgcctcagtagtgcagcttcataacagactggctttgaggcagagtcagcagagaagaaaaaaaaaaaaaagaaactgggaactcccctcgtactgctccaaaccacacactgtagcccacagatgcttgttttacacccactagaaagagggggtttctcctggagttttgccatgtgtgtctgctgcctaattctgggactctgcccaccctcaggtcaaagtggtagataaaggaaggattaaaaaaaaatagtaaactcaccttcatattggttattcttcatattttgactttcttctccaacgcacctgacattgttatttttcagttttcaagaggttgcttttagtattctgcccagagtttttagttgtaattagtgagggagataggctgtaaagggcttattccatcttgacattcactgaaagtcacattatttcattttaaaaataatttttgttttgattttcccaaaattcttcttgttccttgactattataagaacagatttttgttgttgttgttctgtgcatatactggcctcttgtatctctctcaagataccaataaagttaggaacattttatttatttttgttgccttactgtattttctttgggtcattgtgtctctacttctacactttattgcctctcttggtttttattaagtggccagtgattgttagctttcttctttacagtattttcaagtaaaggtcacaatcagtggttgtcttacttgaatgtatatacccattgcttggcggcccaggtaaaatgtagattcctggtcccatggacaaaaatctgattcagtaagtctagagtagggcacataaacaccttaaattcttttgatgctgatagttgaatgatagcccttgaaatcttggaaactggtgtaattctgtacagctcattattcccctttacaaaatactgtcttacccactgagcatcatggctgaccatgggactctgcagttggcttcccgcttgctgtggtgagtgagaggtgggctttccctcccctcccctcccctctttggagacaggatctcattctgtcacccagactggagcacagtagtgtgatcatggctcactgcatccttgaccacccaagatctaggaaactttccacctcagcctcccgagtagctgggactacaggtgctcgccaccatacccattaatttttctgtttttgtagaggtggagtctctgtatgttgcctaggctggtgtggaactcccagcctcaagcaatcctcccacttcagtctcattgggattacaaccgtgagctactgttcctggactcatttttcttatcatgcacttgcagagacaaggctaatagcggggccctgtccctcggtttctgctgttggaaaggaatttttctgcagggagagttctgattagttctgagttgccttcctttttcccccctctccgttgagattgtctttagcctgctattatctccatttcaaagttcacactataagccctcagacaaagactttagactcatgataaatgctgtggctgacacttacttgtctttagagttgtactggccatcattggtgttttttcactcagtcgttttgtggcctgcccacacccccaggcccttctgacctcaggtctttagtaggagaagaggtagatgaatgggctcactctgccatcttaattgaatgtccactgttaatcttaaggtgatattggtttctaatgtgcaaggtatttctgttgaattctcagatataataatcatcatgaaatctgtagtaggatcacaccttatgtatactcaggtgtgcaaagaaaatatagcttctttatttttcttatctcttccttttgatgaaccctggtcactggatggccggaagaagagtaccagacttactcccatctggtaaactgggtcttatccaataatttaaatagttgtgtttggatatttcagcttctggatactactcattcaaatattatctctttcctcagacgtgcccacaacagaatctagacttatgggttggcttgtgtgaccttgtagtggtggaagcacaccaagaccctcaatctatctactgtcttttctggtttcttactggtctctccctggaattgtggccaccgaggtactaccagaactatcgtttgaggtactaccagaactgtctgagacctgttctttttgctcctagaatgcattgtccatctttcctggtgtcacagatagcctgaagtctggcttggccccctgagcctggtattctctcttccaggcctcttgctatggaattactttatccctctggcaaagtcgtcaatctgtatcttaagttacctttcccgtactactttagagcacacagaagtttcctaaggtacatttcctaaatgtaccttcttccatggcacatgagaaataagggagatgccagagctgatctcacattccttctcaatcttcctgtgtttctgtgcatatattttggagtggctatctccagcttctgttgagtaggcatagggagaggaaagaggttggtggtgtgtgtgtgtgtgtgtgtgtgtgtgtgtgtgtatgaaagtgtgtgtgtgtttgtgcgcacacgcgccacgtgtcagggaagttcctggaaggcagtcattttgtacagtcttagtgggaagtgaagctgactgttctagctcccagatttccttactccatcagacattcttttcttctgccccatctgcctgaaagatgatgatgggagtattggtcacttgcatcttctgtctctgtctcaccttttaatcccacaatccttcatccagaatcaggagtttggggctataattcatattttttctaatttatatcatctttctaccctaattgacaggccccatgttctgactgtcatgagcagaagggatatctgctctgtactgtggaagaaactataatcctactcttttcaatcttggccagaaaatattagtgtctaacaaattccttctttgggaaaaccagactttcaaaaacttttatcttagtgtaaaattctttctttaattcataaggtaaatattaactatttctttctcttttcatttttaaactttaccaaatatatggatgctactcatagaataggagggaagtcagtggaaggaaaagcaaatgagaaaagcatgtcagtatcttttcataatcatgagagcatatctactctcagtactcccgtttctcaagacttccttggcttttcttacatttacttttttaattgtagtagagactcttacaagattatgcttctaaaacatattatagttatttgatttgtattaagcttataactttgatatttttaattatagttttctcaaataggaaaatagtgtgtctctattttttcaaatcttctcaaaatatttatcaataaggttttataaaattttgaaatgtggatttaataaatatgtctcacattctttttaggaaattttttttctttttagtttttaagagtaaaatccaggttgcaactcagtttcttctgccttgtagctcttccctgtgtggacccatggcactttgtttatttgtcttttgtagaattcctcatatttgtgtttaccaaactgtagtcagctcaatgcagggaatcagacattgcttgtctttatttgccctagtgcccaacaaattcctgctcatgataggcatggggaaatcagcaattcctgtgctcctttcctgatttattttctccataggacttaccatgttctaacatactgtattgtttatttgttttatttattgtctgtctcttctcactgaattataaatagcatgcaggcagagattttgaacgattttgcttactactgtattcctaacacctagtggagcacctgtcatgaaggtgaccagtatttgttgaatgattaataaattatcaaaatttagataattgtctaaattatatcatatgatctataaaatactgtaagtataaacttctggtataaaaaatagtaatgtaattggaaaggtacattaaaagttaggaagaccttaatatataatctactatcccattttgtgaaatgagcaagaaataatttaagcacaaagcccaagctaattgtggaaatggaccaagaatttagaactcttaagtaaaacataataataatgtcaactggacatgtggtaagcagtatatatggttgtagttaagaaaaagtacaggttctgcaatcagacatttctaggcaagtttcttgatctctctgtgccttagtttcctcccctgcaaactaggaaaaaattgtatctttcttatagattgttctaagacatctatgaaataaagtgtagtaactcttagcacactgcctggcgtttagtgaaggctcaaaaagttagcttccattattactatttggaatatctgccatctgtagcttgtggatgtgagagttctttagtttttggtggggcttttaaaaaatagttcctagaggccaggctatcttttagtctttccttcaatccctctaatatgccaagctccccagttctctgaattgatgcatctactcttctattggcctagagaacactcttctctgacatgctttgcttctttaacacctacttatctttcaggtctcttcctgtttctctcatttttaaatttttattttaagaatttataaatatatacaaaagtagagagtatgatgaatccatcaccatttctatgtatccattacccaccatcaatagctgtggggatttgatctctttaaaaattaaaaaaaagttttcttgaaatcccagtaaataccttttatttttttcttcctagcacattaacacaatttgcaatcatgtatttaatgtctcttttctccattagtttataagctccataaaagctgttttctttattgtgatatatccagtgtctcatacagtgcctgaaacatgataggttctcaaatgtgaaaggaatgaattatttaataactgaaaacgtcgctaaggggtttgaaaagacgagcatttgatgaaaactttttgaaaaagattggtaagaatgacttaggcagctttatattaaaacaataggtaccgttaggctcagattcatatacttattaagcaaccttgtgctcttaatttttttccaagtaagcttctgtgtaaagcaaactcagtgaccttgtgaagagaatattatttgagtttataagatattgtccatagtaaataactaaattagctttgggggatcactcttgggcaaggtaaaatgatcccttgaggtgctgggccttctgggctgagagatcaagcaccttgacggctcatagagaagttatcatcttgaagcctttgcccagccatcaacctactccttgttgctgtagcttcatttgatgaaatttaagaaaagtgtttttctcttcaaattgctatcccctcctaatttttttttttttttttttttttttgatactgttttgaaccagtaaccatggtttcttgtagaggctccttgggagctttaacaacatcagtcagtttcacagctggaagcagagtgatctagataaaagcataataaaaaagcttactgaggtttttttcccccctgttataacaattctttcattagggagcactttgcataaagtgaaatgttctctgttcccactgaagtagacattttaatttaaattaacagtaacgtagtacctggttcctttttagagtctagaaaagggaggtaatactaccattcacctgtccttcacctgaacctaccctgtctctgtccccttctttttttgtttctattttcttaccatctttctgggccaatggtgagtgatagtaatactgacatttggggttcaagatggatgaagtcgtgaagttgtagctttgaattaatgagggaaaaaggagttaagtagcaataaaaacttgatacagtggtaccaggagtttatttgtcaggatcaagaagagtcaaggactggctcttgtcagagggccagagtaagtaatttgttagaagtcagcgttggcagcaagcactgtcttgacggatggcactattgagaagggaaaggaaacctatatttattaaactctttacagaaaagcttgccaaccctcattgagatagactggatcagtctaccctggactggatatgagaatggttatattgtggggaaagcacactcttaggttatactgcttgtggatattagtatagctgtggcataaaaggagcatgatgggaatttggatgagagtagtgggtcttctgggcctttctttatcgaaagtctaaaccctgcctgtgaaaggaaactccaaatgtaaacattgaatgtttatttttttttacacatttctttgtccttcctacatgtatacctatgtccatactctcacatggttttactgtaattctgttattcgtatacttacataaatgtggacttacacaagcatcttaattggaaatgaccttggagatcacgtttcaacatccttattttacaggtggcaaaaactaagtcccttacaagttatatgcctggtgtcacaaaagcag

SEQ ID NO: 1327 - DNA, 308 bp, Homo sapiens
  full length sequence of bloodCirc_01585
gtcaaaggtcgtgataaacatatcaataatttgaaaaagaaatgccagaaggaatcagagcagaaccgggagaagcagcagcgtattgagaccttggagcgctacctggctgacctgcccacactggaagaccatcagaagcagagccagcagcttaaggattctgagttgaagagcacagagctgcaggagaaagtgactgagctggagagtttgctggaggagacccaggcaatctgcagagagaaggagattcaactggaaagcctgaggcagagagaagcagaattctcctccgctggacatag

SEQ ID NO: 1328 - DNA, 528 bp, Homo sapiens
  full length sequence of bloodCirc_04814
acttaattcagtgcacaaatgagatgaatgtgaacatcccacagttggcagacagtttatttgaaagaactactaatagtagttgggtggtggtcttcaaatctctcattacaactcatcatttgatggtgtatggaaatgagcgttttattcagtatttggcttcaagaaacacgttgtttaacttaagcaattttttggataaaagtggattgcaaggatatgacatgtctacatttattaggcggtatagtagatatttaaatgagaaagcagtttcatacagacaagttgcatttgatttcacaaaagtgaagagaggggctgatggagttatgagaacaatgaacacagaaaaactcctaaaaactgtaccaattattcagaatcagatggatgcacttcttgattttaatgttaatagcaatgaacttacaaatggggtaataaatgctgccttcatgctcctgttcaaagatgccattagactgtttgcagcatacaatgaaggaattattaatttgttgg

SEQ ID NO: 1329 - DNA, 194 bp, Homo sapiens
  full length sequence of bloodCirc_06795
tgaagttattcgaagtcattgaaactgaaaaaacactctacctaatcatggaatatgcaagtggaggtgaagtatttgactatttggttgcacatggcaggatgaaggaaaaagaagcaagatctaaatttagacagattgtgtctgcagttcaatactgccatcagaaacggatcgtacatcgagacctcaag

SEQ ID NO: 1330 - DNA, 1444 bp, Homo sapiens
  full length sequence of bloodCirc_18206
gtcgttgaggacttccacatggagattggcacaggaccagactcaagacacacaactcataacagttgatgaaaaattggtaaggattttctactacacactgctatggttctgccttcagggttatttttgtactatagatattcagtatggtgttccaggttttcaggaaagtgatttgaatttgaatttctagattatacctaaattttaagaagaaatatttgtcatcaaaagataatttatattaagcattataaacaaatacaaaaccatatgcaaatattaataaattaaaattatgaaaggttttcatttttgtggtgtttataactagcagaacattcattactttttgtaatgaatgttttgctttttattttctcagttacactcctatttaagttgtgagatacttgctagtactatctaaaactaaatatattaggttttcttggaagcatgcaacatttattatcactatatgtatatatgtatatgcatacaaacacatacacacacattttatttcttcatatgtatgaagaaataactagcaagcaactagcaaacaactagcaagaccagcaacaaatgagtaataatgttttgtgaatcagtaacaaacagaattttggcagccatcacttataaaatattttagagtgtggtctgttactttacatgcaactttatatttatgcttcaatagcatacattttgtaatgtttccaaaacttctgatagaaatgagtaattgtatatgtgtgcttttcattttatatctggtttaccattatcagtgtttcttaactaccccctttattattgtacagtattttatcactcaactttgagcctgtaagcccaatctaagtaataggtcacacttaaatttctatttgcaccattaaagatacagacaaataaatgtataagtaaatagagacagtttggaaaattcacatcttgtgctgactggttttattttaaaattatctcttcagtttacctactgacattgtcatcatcctgatctaggttacatcatctttcacctagatttctacagtagtctttgacctgatctccctagactctttaatcctaatctgattaattttccttaggatgccaaaatagtctttgaaatgctggtattgtcaccctcttttcgtcctttggtgcttcctgttgcccttagagtaaacactaaaatcctaacatggtctttgacgtcttgcctgatttagctcctgccttcctctctaggtttatcttgtaccactgtgttttacattctgtggtctagccacaccaagcctggaacttgctactctttttcctgcttcaaggcatttggagttcctgttcactctacctggatgcattttaactaatcctgaggacttcatccggtcaccatctacctattcttcaaatg

SEQ ID NO: 1331 - DNA, 279 bp, Homo sapiens
  full length sequence of bloodCirc_08277
gtatttctggtggtcgcattcatatgtcagttttaggaaggcttgggacatttgaaactcagattctgcaaagagctcctcttagatcctttacagaaacaccagcatactttgcctcaaaagatgggataagtaaagatggttctggagatggaaataagaaatcagcaagtgagggaagtagtaagaaatcaggctctgggaattctgggaaaggtggaaaccagctgcgctgtcctaaatgtggcgacttgtgcacacatgtagagacctttgtat

SEQ ID NO: 1332 - DNA, 5918 bp, Homo sapiens
  full length sequence of bloodCirc_15888
acgtatattatatgagaagctcattggagaagacaaagccttattgaaatatctgtctgttttggaaggtttatattctgcaagatcctgaagatactttccttcttttctgtaagtaaaatatgtcatgacaaaaccatctggggaaaatcaacttgacactatgtgggtaaaggacttgacaaaaatacaggcagttttgttcttaccaattgaggaaaaggtttagttctttaagttgtttgataccaccaaggaaacactggaaggagttaatgtgctcctgaagaaaagggttcttgaggaaaccttagggtagaaatttactgcaagtcctttaggatcagaaacaaaattatttaaggtttcctttgagtctacattctcagttttgtcattttgttgaaaagtttcccactggctatgttaagaatcgtattcctttcaaggtttcctccatcactgatacagaatgacctggagttactagaaaatagattgcatgagaacggaaaaacctttcatctttccttcttttttttcttttttgagacagggtctccctctgtcacccaggctggagtgcagtggtattatcacggctcaccgtaaccttgacctcccttggctcacatagtcctcccacctcagcctcccaagtagctgggactacaggtgttcgtcaacatgtctggataattttttttttttgtaaagacagaatttcaccatgttgcctagtctggtcatttttctaatattggtaaggaaatctgcctacagggtccaaataatacagttcttttaaaagtactaggttatcctttgaactaggtagtccttgatctgcatcatgtgaactgaaaaaggtaactggacctggccaatcagtcatataaaaacctaggtgttctctgtagatatgacaagaagaataaggaagatagacaggaagttcttcctatttcctgcttatcctgtgctgctttttcctgtcatctctttctcagggctgtctattctggagcttgttgaaaccattttgtttggaagcaattttaagaaagaataattttttacataaatctgtggtccaggaatactctggcaggtctaaggcataggcattgttagttgagaaggaaagaaaatggatcatgggggtagaggagaaagaaaagaaagaagtacattcaaaagaatgctaccagaagtggtttcagattagtgtctcagtagtatggcatattatgtttaattttgatgtgatccagttggggactagtttattttttgagccttagattggaatgtttttatttttatttatttattttttgagatagggtctcactctgtcacccaggctggagtgcagtgatcatggctcactgcagcgttgacctcccagggtcagtcagttcttgcacctcagcctcccaagtagctggaactacaggcgtgtgccaccatgcctggctaatttttttaaaatttttctagagacagggttttgcccaggctggtctcaaactcctatgctcaagcagttctcctgattcagcctcccaaagtgctgggattattagatgtgagccaccacgcctggttttaaaatgcatctctttttccttaatgctattgaaattttagagaattaagaaaaaatgcatccataatcctatcttcctaaaaaaaccactgttaaactattgatatacttccagccaaatctatttttattctctaatgatttttatgtgtctggaattagaaaatgcttacatttttgtttcctgcttctgtgaaatatctttcattgtgtccttggaaagctgactgatggacaaatattggatgataccatagtgcattcactaaattgtcaatctagtctgaaaaggaacattgcattgcatgttgcttatttttagtagatggctaatatttgcatgcaccactaccatttttttaaaaatttcatttcggtcatgtggctcatgcctgtaatcctagcactttggaaggctgaggcgggcggatcacctgaggtcaggagtttgagaccagtctggccaacatggtgaaaccccgtctctactaaaattacaaaattagccaggtatggtggcacacacatgtagtcccagctactcgggaggctgagacaggagaatcacttgaacccgggaggcaaagactgcagtgagccaagatcatgtcactgcagtccagcctgggcaagaaagagcgagactccgtctcaaaaaaaaaaaattatttcaatagtttttggagtacagatggtttttggttatgtgggtaagttctttagtggtgatttctgagattttagtgcacctgtcacccaagcagtttatggtgtacccactgtgtagtattttactccttacccagccgtccttgcccccaccaccaagtccccaaagtctattatatcattcttatgcctttgtgtctgtatattttagctcccaattataagtgagatcatatgttacttcacttacagtaatggcctccagctccatccaagtcactgcaagagacattatttcattcatttttatggctgagtagtattacatggtgtatatatatcacattttctttatcttcttgttggttgatgagcacttgtgttttttccgtatctttgcaattgtgaattgttttgctataaacgtgtgtgtgtatgtgtctttttcatataataacttcttttccttggtagagacctagtagtgggattgctgaatcaaatggtagttctacttttagttctttaagaaatcttccggccaggcctggtggctcatgcctgtaatcccagcactttgggaggccgaggcaggcagatcacccgcctcctgaggtcaggagttcaagaccagcctggccaacatggcgaaaccccgtttctactaaaaatacataaattcgctgggcatggtggcatacgcctgtagttccagctacttggaaagctgaggcaggagaattgcttgaacccgggaggcggaggttgcagtgagctgagattgtaccactgcactctagcctgagtgacagagcgagactccatctcaacaaaaaaaaaaaaagaaaaaaaaaagaaatcttcatattgttttccatagtggttgtactagtttacatttccaccagcaatgtatacactgttactattaggtaagtgaataatctttaaaattatgctgaagatgattagagaactctgagaaaagttttctgtccttatcaggagttgttctgatttgtatctgggatatatcagctgctacattaagaagtaccttttgtcatgttcccttttttttttttgagatggagtcttgctctgttgcccaggttggagtgcagtggcacgatctcggttcactgcaatctccacctcctggattcaagcgattctcctccctcagcctcccgagtacctgggattacagacatgtgccacctcgcccagctaatttttgtatttttagtagagatggggtttcgccatgttggccagactggtcttgaactcctgatctcctgtgatttgcccgccttggcctcccaaagtgttgtattacaggcatgagccaccatgcccagctggtgtttccatttttaaatgagttcttaataatcatatccagatatatcttctctagtgaagtaaaagtaataaaccatcatcagtctttattctggtggacagaataacaagctagctctgatgaatgagaaatggtgtcagataagttgggaatgtcctgaatctttattggagaaaactttttggtggaatagttctgctttatttagccggaatcaactaaattccagtacattaaagtcacttagaatttcagtatagccaattgtgttaggacagacttacttgagaatttctttgtgattcatactgtaatgaaattttgctggtttattttgttaaagcaagtcaaaaattttttaagttatggaatatttagctaaatgagctatacttcttagcaatgtgtatagaagaaaagagggcatgaaatttgggttgcattctttcatggtaatctttaatctcaaataccatctaaccaaaggttagatggtctttttcatccttattatttaatcctggtggatgggtttttcttcttccttttgttaaaataggtctaataagtaatagtaacaggttcatagatatattcttttttttatatttcgagaaggagtttctctcttgttgcccaggctggagtgcagtggtgcaacctcggctcactgaaacctctgtctcccaggttcaagcgattctcctgccccagcctcccaagtagctgggattacaggcatgcaccaccatgtcctgctaattttgtatttttagtagagatggggtttcaccatgttggtcaggctggtcttgaactcctgatcccaggtgatccacctgctttggccttccaaagtgctgggattacaggcgtgagccaccgcgcctggcgatatattcttaatcatttgactatatcagttttcttcatcaccgtacctttagcacctcctatagtacctggtaacaacatggacagtgttggttattgttaattgcagagtaataaaccttcattttttcttttatatggttgtgggttttttttgtctgtttgtttttgtttttttttgaggtggagtctctctctgtcacccaggctggagtccagtggcgtgatcttggctgactgcaacctccatctcctgggtttaggtgactcttgtgcctcagccaccatagtagctgggattataggcatgcgccaccatgcctggctaatttttgaatttttagtggagatggggttttaccatgttggccaggctggtctcgaactcctggcttcaagtgatctgcccacctcagcctccccaagtgctgggattacaggtgagagccaccgtgcctgacgttgtcatggtttaattggaatttttcttaaattacactaaaaagcaaagttacttttgtaactataaggcttagtagtaaaacctcttgaacattttcttctaaaagtttaggctgaataacttctgaaatgtttttcattctgggatggaaattggttttagaaataactatagttatttatttatttatttatttattttgagacagagtcttgctccgtctcccaagctggagtgctgtggcgcaatcttggctcactacaacctccgcctcctaggttcaagtgattttcctgcctcagcctctagagtagctgggattacagacatgcaccaccctgctcggctaatttttgtatttttgatagagacagggtttcaccatgttggccaggctgcccagctatagtaattttaaatggttaagtagaatttctgctgatggcagctttctgaggctaatattataatacacacagattgctgtgggtagcatagtgaaaagaagtaggagttttagtaattagtataaaattaaatattctaaaatttattggaataatttggtagtgggaagaggtatttggtgactaatttctctgttaaaagtgaatatataaatgagcatgaaaattgcacaaagaaataccttaagttattatgtttttgtttacttcagggctgaaaacacagttaaatcactttcaaagttaaaagactattaagaacacaagatggggactcctgcttctggaaggaaaagaacacctgtgaaagaccgattttctgcagaagatgaagctttgagtaacattgccagagaggcagaggcaaggctggcagcaaaacgggctgcccgggcagaagcaagagatatacgcatgagagaactggaacgacaacaaaaagag

SEQ ID NO: 1333 - DNA, 347 bp, Homo sapiens
  full length sequence of bloodCirc_14215
gcttattgcagtatattatatctaaagccaagaatgcagatcatcctacgtggacagaaagtgaagacacagctggtttcgaagagtcttgcctacatcgaacgtgatgtttatcgaccaaaatttttatctaaaacagtgagaattacctttggattcaactgcagaaataaagatcattatgggataatgatgtatcacagaaatagactcatcaaagcttatgaaaaagttggatgtcagttaagggcaaacaacatgggtgttggagtggttggaattatagagtgtaatttccttaagccaactcataataaacaagatttcgactatactaatgagtacag

SEQ ID NO: 1334 - DNA, 550 bp, Homo sapiens
  full length sequence of bloodCirc_21103
tacaaaaattgagaaagagaaaagagagcacgcaaaacaacatgggatgatccgcacagagataacaggagctgagattgcggaagaaatggagaaggaaaggcgcctctttcagctccaaatgtgtgaatatctcattaaagttaatgaaatcaagaccaaaaagggtgtggatctgctgcagaatcttataaagtattaccatgcacagtgcaatttctttcaagatggcttgaaaacagctgataagttgaaacagtacattgaaaaactggctgctgatttatataatataaaacagacccaggatgaagaaaagaaacagctaactgcactccgagacttaataaaatcctctcttcaactggatcagaaagaagattctcagagccggcaaggaggatacagcatgcatcagctccagggcaataaggaatatggcagtgaaaagaaggggtacctgctaaagaaaagtgacgggatccggaaagtatggcagaggaggaagtgttcagtcaagaatgggattctgaccatctcacatgccaca

SEQ ID NO: 1335 - DNA, 208 bp, Homo sapiens
  full length sequence of bloodCirc_03209
gaatgtatcctgtcaggtataatgtcagtgaatggcaagaaagttcttcatatggatcgaaacccttactacggaggagagagtgcatctataacaccattggaagatttatacaaaagatttaaaataccaggatcaccacccgagtcaatggggagaggaagagactggaatgttgacttgattcccaagttccttatggctaatg

SEQ ID NO: 1336 - DNA, 191 bp, Homo sapiens
  full length sequence of bloodCirc_20435
aagaagaagaggacagtgctccagtgaaagtggaagaacaaaggaagatgagtcaggatagtgtccatcacacctcaggggataagagcactgattatgctaatttttaccagggattgtgggattgtactggagctttttctgatgagttgtcatttaagcgtggtgatgtgatttacattcttagcaag

SEQ ID NO: 1337 - DNA, 237 bp, Homo sapiens
  full length sequence of bloodCirc_18379
gctgagagcacagacaaaacaacaactcttagaatataaatcaatggttgatgcaagtgaagaaaaaactccagaacaaattatgcaagaaaagcaaatcgaagctaaaattgaagacctggaaaatgaaattgaagaggtaaaagttgcttttgagataaaaaagcttgcattagacaggatgagactttcaactgcacttaaaaaaaacctggagaaaattagcagacagtctag

SEQ ID NO: 1338 - DNA, 238 bp, Homo sapiens
  full length sequence of bloodCirc_07964
ggacttcagtactagtgctaataacatccagattgataaaaccaagcctttgtggcacaactatttcttatgtggacttaaaggaattcaggaacactttggtcttagtaacctgactggaatgaactgcctggtagatggaaatatcccaccaagttctggcctctccagctccagtgctttggtctgttgtgctggcttggtgacgctcacagtgctgggaaggaatctatccaag

SEQ ID NO: 1339 - DNA, 358 bp, Homo sapiens
  full length sequence of bloodCirc_09370
gctgtgtacatgatgccaaccgagggggatgattcgtctaaaagcgtccctttagcattacaaagagtgttctatgaattacagcatagtgataaacctgtaggaacaaaaaagttaacaaagtcatttgggtgggaaactttagatagcttcatgcaacatgatgttcaggagctttgtcgagtgttgctcgataatgtggaaaataagatgaaaggcacctgtgtagagggcaccatacccaaattattccgcggcaaaatggtgtcctatatccagtgtaaagaagtagactatcggtctgatagaagagaagattattatgatatccagctaagtatcaaaggaaagaaaaata

SEQ ID NO: 1340 - DNA, 304 bp, Homo sapiens
  full length sequence of bloodCirc_20041
ttgtgctgcatggaaacaacctgttagtatttggaggtacgggcatcccatttggagagagcaacggcaatgacgtccatgtgtgtaatgtgaagtataagagatgggctttgctcagctgtcgggggaagaaacccagtcgtatatatggacaggctatggccatcatcaatggctccctttatgtctttggaggtacaaccggctatatttacagcacagacctgcacaagttagatctcaataccagagagtggacacaactgaaaccaaacaacctatcctgtgatctaccagaagagag

SEQ ID NO: 1341 - DNA, 307 bp, Homo sapiens
  full length sequence of bloodCirc_11772
gttatcaagttatacccaaccagcagcaaaactaccaaggaatagttggagttcagcaaccccagagtcagagcctagtcagtggccaacccaacagcattggaaatcagattcaaggagtggtcatcccctatacttcagtgccaacatatcaggtttcactgcctcaaggttctcaaggaattccccatcagacttatcaacagcctgttatgttccctaatcagtctaatcaaggatctatgcccacaacaggaatgcctgtttactatagtgtcattccacctggtcaacaaaacaatttaag

SEQ ID NO: 1342 - DNA, 225 bp, Homo sapiens
  full length sequence of bloodCirc_12227
ttttgcacagtaataagttgactcacacagacttaaagcctgaaaacatcttatttgtgcagtctgactacacagaggcgtataatcccaaaataaaacgtgatgaacgcaccttaataaatccagatattaaagttgtagactttggtagtgcaacatatgatgacgaacatcacagtacattggtatctacaagacattatagagcacctgaagttattttag

SEQ ID NO: 1343 - DNA, 193 bp, Homo sapiens
  full length sequence of bloodCirc_21187
cacttgcacctcctgcgccgccgccccccatccaaggatatgccttcaagcctccacctagacccgactttgggacctccgggagaacaatcaaattacaggccaatttcttcgaaatggacatccccaaaattgacatctatcattatgaattggatatcaagccagagaagtgcccgaggagagttaacag

SEQ ID NO: 1344 - DNA, 375 bp, Homo sapiens
  full length sequence of bloodCirc_06474
cacaagtgcatacaccttgatagcaccaaatataaaccggagaaatgagatacaaagaattgcggagcaggagctggccaacctggagaagtggaaggagcagaacagagctaaaccggttcacctggtgcccagacggctaggtggaagccagtcagaaactgaagtcagacagaaacaacaactccagctgatgcaatctaaatacaagcaaaagctaaaaagagaagaatctgtaagaatcaagaaggaagctgaagaagctgaactccaaaaaatgaaggcaattcagagagagaagagcaataaactggaggagaaaaaaagacttcaagaaaaccttagaagagaagcatttagagagcatcagcaata

SEQ ID NO: 1345 - DNA, 357 bp, Homo sapiens
  full length sequence of bloodCirc_07887
gtgaagctgaacccagatctacacatacagctaatcttaccaaaatgtgtggaagtaaagcaatctgaaggaaattcagtaccatacaatttactgactgaaatacatcatattgctcatactaagaataagagtggagaagaatcatttttttcctgctaaaatgatagaggcagaagagcaacagccttgcaagacagacttctattctgaattgccaaaagtggaacttcatgcccacttgaatggatccattagttctcataccatgaagaaattaatagcccagaagccagatcttaaaatccacgatcagatgactgtgattgacaagggaaagaaaagaactttggaaga

SEQ ID NO: 1346 - DNA, 7284 bp, Homo sapiens
  full length sequence of bloodCirc_04380
attactggtggtctacccttggacccagaggttctttgagtcctttggggatctgtcctctcctgatgctgttatgggcaaccctaaggtgaaggctcatggcaagaaggtgctaggtgcctttagtgatggcctggctcacctggacaacctcaagggcactttttctcagctgagtgagctgcactgtgacaagctgcacgtggatcctgagaacttcagggtgagtccaggagatgcttcacttttctctttttactttctaatcttacattttggttcttttacctacctgctcttctcccacatttttgtcattttactatattttatcatttaatgcttctaaaattttgttaattttttatttaaatattctgcattttttccttcctcacaatcttgctattttaaattatttaatatcctgtctttctctcccaaccccctcccttcatttttccttctctaacaacaactcaaattatgcataccagctctcacctgctaattctgcacttagaataatccttttgtctctccacatgggtatgggagaggctccaactcaaagatgagaggcatagaatactgttttagaggctataaatcattttacaataaggaataattggaattttataaattctgtagtaaatggaatggaaaggaaagtgaatatttgattatgaaagactaggcagttacactggaggtggggcagaagtcgttgctaggagacagcccatcatcacactgattaatcaattaatttgtatctattaatctgtttatagtaattaatttgtatatgctatatacacatacaaaattaaaactaatttggaattaatttgtatatagtattatacagcatatatagcatatatgtacatatatagactacatgctagttaagtacatagaggatgtgtgtgtatagatatatgttatatgtatgcattcatatatgtacttatttatgctgatgggaataacctggggatcagttttgtctaagatttgggcagaaaaaaatgggtgttggctcagtttctcagaagccagtctttatttctctgttaaccatatgcatgtatctgcctacctcttctccgcagctcttgggcaatgtgctggtgtgtgtgctggcccgcaactttggcaaggaattcaccccacaaatgcaggctgcctatcagaaggtggtggctggtgtggctaatgccctggctcacaagtaccattgagatcctggactgtttcctgataaccataagaagaccctatttccctagattctattttctgaacttgggaacacaatgcctacttcaagggtatggcttctgcctaataaagaatgttcagctcaacttcctgattaatttcacttatttcatttttttgtccaggtgtgtaagaaggttcctgaggctctacagatagggagcacttgtttattttacaaagagtacatgggaaaagagaaaagcaagggaaccgtacaaggcattaatgggtgacacttctacctccaaagagcagaaattatcaagaactcttgatacaaagataatactggcactgcagaggttctagggaagacctcaaccctaagacatagcctcaagggtaatgctacgattaaactccaacaattactgagaaaataatgtgctcaattaaaggcataatgattactcaagacaatgttatgttgtctttcttcctccttcctttgcctgcacattgtagcccataatactataccccatcaagtgttcctgctccaagaaatagcttcctcctcttacttgccccagaacatctctgtaaagaatttcctcttatcttcccatatttcagtcaagattcattgctcacgtattacttgtgacctctcttgaccccagccacaataaacttctctatactacccaaaaaatctttccaaaccctcccccacaccattttttatatttttatatttttcttatttatttcatgcacacacacacactccgtgctttataagcaattctgcctattctctaccttcttacatgcctactgtgcctcatattaaattcatcaatgggcagaaagaaaatatttattcaagaaaacagtgaatgaatgaacgaatgagtaaatgagtaaatgaaggaatgattattccttgctttagaacttctggaattagaggacaatattaataataccatcgcacagtgtttctttgttgttaatgctacaacatacaaagaggaagcatgcagtaaacaaccgaacagttatttcctttctgatcataggagtaatatttttttccttgagcaccatttttgccataggtaaaattagaaggatttttagaactttctcagttgtatacatttttaaaaatctgtattatatgcatgttgattaattttaaacttacttgaatacctaaacagaatctgttgtttccttgtgtttgaaagtgctttcacagtaactctgtctgtactgccagaatatactgacaatgtgttatagttaactgttttgatcacaacattttgaattgactggcagcagaagctcttttatatccatgtgttttccttaagtcattatacatagtaggcactgagaactctttatatctgaataagatatttaggaaccactggtttacatatcagaagcagagctactcagggcattttggggaagatcactttcacattcctgagcatagggaagttctcataagagtaagatattaaaaggagatacttgtgtggtattcgaaagacagtaagagagattgtagaccttatgatcttgatagggaaaacaaactacattcctttctccaaaagtcaaaaaaaaagagcaaatatagcttactataccttctattcctacaccattagaagtagtcagtgagtctaggcaagatgttggccctaaaaatccaaataccagagaattcatgagaacatcacctggatgggacatgtgccgagcacacacaattactatatgctaggcattgctatcttcatattgaagatgaggaggtcaagagatgaaaaaagacttggcaccttgttgttatattaaaattatttgttagagtagagcttttgtaagagtctaggagtgtgggagctaaatgatgatacacatggacacaaaaaatagatcaacagacacccaggcctacttgagggttgagggtgggaagagggagacgatgaaaaagaacctattgggtattaagttcatcactgagtgatgaaataatctgtacatcaagacccagtgatatgcaatttacctatataacttgtacatgtacccccaaatttaaaatgaaagttaaaacaaagtataggaatggaattaattcctcaagatttggctttaattttatttgataatttatcaaatggttgtttttcttttctcactatggcgttgctttataaactatgttcagtatgtctgaatgaaagggtgtgtgtgtgtgtgaaagagagggagagaggaagggaagagaggacgtaataatgtgaatttgagttcatgaaaatttttcaataaaataatttaatgtcaggagaattaagcctaatagtctcctaaatcatccatctcttgagcttcagagcagtcctctgaattaatgcctacatgtttgtaaagggtgttcagactgaagccaagattctacctctaaagagatgcaatctcaaatttatctgaagactgtacctctgctctccataaattgacaccatggcccacttaatgaggttaaaaaaaagctaattctgaatgaaaatctgagcccagtggaggaaatattaatgaacaaggtgcagactgaaatataaatttttctgtaataattatgcatatactttagcaaagttctgtctatgttgactttattgctttttggtaagaaatacaactttttaaagtgaactaaactatcctatttccaaactattttgtgtgtgtgcggtttgtttctatgggttctggttttcttggagcatttttatttcattttaattaattaattctgagagctgctgagttgtgtttactgagagattgtgtatctgcgagagaagtctgtagcaagtagctagactgtgcttgacctaggaacatatacagtagattgctaaaatgtctcacttggggaattttagactaaacagtagagcatgtataaaaatactctagtcaagtgctgcttttgaaacaaatgataaaaccacactcccatagatgagtgtcatgattttcatggaggaagttaatattcatcctctaagtatacccagactagggccattctgatataaaacattaggacttaagaaagattaatagactggagtaaaggaaatggacctctgtctctctcgctgtctcttttttgaggacttgtgtgtgtgtgtgtgtgtgtgtgtgtgtgtgtgttgtggtcagtggggctggaataaaagtagaatagacctgcacctgctgtggcatccattcacagagtagaagcaagctcacaatagtgaagatgtcagtaagcttgaatagtttttcaggaactttgaatgctgatttagatttgaaactgaggctctgaccataaccaaatttgcactatttattgcttcttgaaacttatttgcctggtatgcctgggcttttgatggtcttagtatagcttgcagccttgtccctgcagggtattatgggtaatagaaagaaaagtctgcgttacactctagtcacactaagtaactaccattggaaaagcaacccctgccttgaagccaggatgatggtatctgcagcagttgccaacacaagagaaggatccatagttcatcatttaaaaaagaaaacaaaatagaaaaaggaaaactatttctgagcataagaagttgtagggtaagtctttaagaaggtgacaatttctgccaatcaggatttcaaagctcttgctttgacaattttggtctttcagaatactataaatataacctatattataatttcataaagtctgtgcattttctttgacccaggatatttgcaaaagacatattcaaacttccgcagaacactttatttcacatatacatgcctcttatatcagggatgtgaaacagggtcttgaaaactgtctaaatctaaaacaatgctaatgcaggtttaaatttaataaaataaaatccaaaatctaacagccaagtcaaatctgcatgttttaacatttaaaatattttaaagacgtcttttcccaggattcaacatgtgaaatcttttctcagggatacacgtgtgcctagatcctcattgctttagttttttacagaggaatgaatataaaaagaaaatacttaaattttatccctcttacctctataatcatacataggcataattttttaacctaggctccagatagccatagaagaaccaaacactttctgcgtgtgtgagaataatcagagtgagattttttcacaagtacctgatgagggttgagacaggtagaaaaagtgagagatctctatttatttagcaataatagagaaagcatttaagagaataaagcaatggaaataagaaatttgtaaatttccttctgataactagaaatagaggatccagtttcttttggttaacctaaattttatttcattttattgttttattttattttattttattttattttgtgtaatcgtagtttcagagtgttagagctgaaaggaagaagtaggagaaacatgcaaagtaaaagtataacactttccttactaaaccgacatgggtttccaggtaggggcaggattcaggatgactgacagggcccttagggaacactgagaccctacgctgacctcataaatgcttgctacctttgctgttttaattacatcttttaatagcaggaagcagaactctgcacttcaaaagtttttcctcacctgaggagttaatttagtacaaggggaaaaagtacagggggatgggagaaaggcgatcacgttgggaagctatagagaaagaagagtaaattttagtaaaggaggtttaaacaaacaaaatataaagagaaataggaacttgaatcaaggaaatgattttaaaacgcagtattcttagtggactagaggaaaaaaataatctgagccaagtagaagaccttttcccctcctacccctactttctaagtcacagaggctttttgttcccccagacactcttgcagattagtccaggcagaaacagttagatgtccccagttaacctcctatttgacaccactgattaccccattgatagtcacactttgggttgtaagtgactttttatttatttgtatttttgactgcattaagaggtctctagttttttatctcttgtttcccaaaacctaataagtaactaatgcacagagcacattgatttgtatttattctatttttagacataatttattagcatgcatgagcaaattaagaaaaacaacaacaaatgaatgcatatatatgtatatgtatgtgtgtatatatacacacatatatatatatattttttcttttcttaccagaaggttttaatccaaataaggagaagatatgcttagaaccgaggtagagttttcatccattctgtcctgtaagtattttgcatattctggagacgcaggaagagatccatctacatatcccaaagctgaattatggtagacaaaactcttccacttttagtgcatcaacttcttatttgtgtaataagaaaattgggaaaacgatcttcaatatgcttaccaagctgtgattccaaatattacgtaaatacacttgcaaaggaggatgtttttagtagcaatttgtactgatggtatggggccaagagatatatcttagagggagggctgagggtttgaagtccaactcctaagccagtgccagaagagccaaggacaggtacggctgtcatcacttagacctcaccctgtggagccacaccctagggttggccaatctactcccaggagcagggagggcaggagccagggctgggcataaaagtcagggcagagccatctattgcttacatttgcttctgacacaactgtgttcactagcaacctcaaacagacaccatggtgcatctgactcctgaggagaagtctgccgttactgccctgtggggcaaggtgaacgtggatgaagttggtggtgaggccctgggcag

SEQ ID NO: 1347 - DNA, 232 bp, Homo sapiens
  full length sequence of bloodCirc_20067
tacttgattctaaagctcgaaaggcctgctatagttcagaatatcacatttggaaaatatgagaaaactcatgtttgcaatttgaagaaatttaaagtctttggtggaatgaatgaagaaaatatgacagagctgttgtccagtggcttaaagaatgattataacaaagaaacattcaccttgaagcataaaattgatgaacagatgttcccttgtcgattcattaaaatag

SEQ ID NO: 1348 - DNA, 607 bp, Homo sapiens
  full length sequence of bloodCirc_01978
atctcttctctgaaagctgaattaactagtcaggaatcgcagatctccacttacgaagaagaattggcaaaagctagagaagagctgagccgtctacagcaagaaacagcagaattggaggagagtgtagagtcagggaaggctcagttggaacctcttcagcagcacctacaagattcacaacaggaaattagttcaatgcaaatgaaactgatggaaatgaaagatttggaaaatcataatagtcagttaaattggtgcagtagcccacacagcattcttgtaaacggagctacagattattgcagcctcagcaccagcagcagtgaaacagccaaccttaatgaacatgttgaaggccagagcaacctagagtctgagcccatacaccaggaatctccagcaagaagtagtcctgaactactgccttctggtgtgactgatgaaaatgaggtgactacagctgttactgaaaaagtttgttctgaactcgacaataatagacattcaaaagaggaagatccatttaatgtagactcaagttcgctgacaggtccagttgcagatacaaacttggattttttccagtctgatccttttgttggca

SEQ ID NO: 1349 - DNA, 440 bp, Homo sapiens
  full length sequence of bloodCirc_05796
atacaattgaaaaggaaataagaaaaatcttcagtattccagatgaaaaggagaccagattgtggaacaaatacatgagtaacacatttgaaccactgaataaaccagacagcaccattcaggatgctggtttataccaaggacaggtattagtgatagaacagaaaaatgaagatggaacatggccaaggggtccttctactcctaagtccccaggtgcatccaatttttcaactttaccaaagatctctccttcatctctatcaaataattataacaacatgaacaacagaaatgtgaaaaactcaaattactgtcttccatcatataccgcttataagaactatgattattcggaacctggaagaaacaatgaacagccaggcctctgtggcctaagtaacttgggaaatacgtgtttcatgaactcagctattcag

SEQ ID NO: 1350 - DNA, 402 bp, Homo sapiens
  full length sequence of bloodCirc_06458
aaaacttgtcagccaaagaattgaagaaaatgcttagcaagcagagaagagctcagaaaaaggctaaactagaagaagaaagaaagcatgcagaaagagaacgtcaacagaaaaatcaaaagaaaaaaagagatgaagaagaagaagaagccagtggccttaaggaagaacttatacctgaaaaattagaaagggtagaaaatccattagaggaagccgttaagttccttatacctcttaagaaccttgttgctgataacattgacactcatctgttagcatttgaaatatattttagaaaaggaaagtttctgttaatgctgcagtctgtcaaacgagcttttgccattaacagtaataacccatggttacatgaatgtttaattagattttctaaatctg

SEQ ID NO: 1351 - DNA, 312 bp, Homo sapiens
  full length sequence of bloodCirc_12631
gctactgtggagccgatatcaaggccctgtgcactgaagccgccctgattgcactgcggaggcgttatccccagatctatgctagcagtcataaactgcagctggatgtttcctcaatagtgcttagtgcccaagatttttaccatgcaatgcagaatatcgtgcctgcttcccaacgtgctgtgatgtcttcagggcatgcactatcccccatcataagaccactgctggaaagaagcttcaacaacatcctagcagtcttgcaaaaagtgtttcctcatgctgaaattagccagagtgacaaaaaagaag

SEQ ID NO: 1352 - DNA, 163 bp, Homo sapiens
  full length sequence of bloodCirc_16247
gtaccaggttgaattggaaaacctaaaagatgaatatgtaagaacacttgaagagacgaggaaagaaaagacattgttgaatagtcagttagaaatggaaagaatgaaagttgaacaagaaaggaagaaagccatttttactcaagaaacaataaaagaaaag

SEQ ID NO: 1353 - DNA, 311 bp, Homo sapiens
  full length sequence of bloodCirc_16972
atgaagaagatgactttatgtgtaagaaggcggcctctaaatcaaaagagaatggaagatctacaaatagtcatcttggaacatcaaacatgaaaaagaatgaagaaaacactaagaccaagaataagcctttatcaccaataaaacttacacccacatcagtacttgattattttggaactggaagtgtccaaagatctaataagaagatggtggcaagcaaaagaaaagagctttcacaaaatacagatgagtctggattaaatgatgaagccatcgccaagcaattacagcttgatgaagatgcggag

SEQ ID NO: 1354 - DNA, 329 bp, Homo sapiens
  full length sequence of bloodCirc_12660
cactgctgaagctgtactacaggaaatggacaacattaacatccgacagaatcgtcgatcaggagaagtagaacgacttcgaatgtggacagatacagaatttgaaaacatggatatgtattcaagagtgaaaaggcgaagaaagtcactaagaagaaatagttatgggatacaaaatcatcatgaagtttctactgagggtgaagaagaagaatctcaagaggaggatggagatatagaagttgaagaggcagaaggagaagaaaatgatagaccatataatttgagacagagaaaaacagtggatcgataccaagcacctccaatag

SEQ ID NO: 1355 - DNA, 343 bp, Homo sapiens
  full length sequence of bloodCirc_03207
gaatgtatcctgtcaggtataatgtcagtgaatggcaagaaagttcttcatatggatcgaaacccttactacggaggagagagtgcatctataacaccattggaagatttatacaaaagatttaaaataccaggatcaccacccgagtcaatggggagaggaagagactggaatgttgacttgattcccaagttccttatggctaatggtcagctggttaagatgctgctttatacagaggtaactcgctatctggattttaaagtgactgaagggagctttgtctataagggtggaaaaatctacaaggttccttccactgaagcagaagccctggcatcta

SEQ ID NO: 1356 - DNA, 318 bp, Homo sapiens
  full length sequence of bloodCirc_14164
gtcaaaggccctttcagaagcaactccatttcattggataacttaaaaccctccagagtgtactgtttacaagtccaggcacaactgctttggaacaaaagtaacatctttagagtcgggcatttaagcaacatatcttgctacgaaacaatggcagatgcctccactgagcttcagcaagtcatcctgatctccgtgggaacattttcgttgctgtcggtgctggcaggagcctgtttcttcctggtcctgaaatatagaggcctgattaaatactggtttcacactccaccaagcatcccattacagatagaagag

SEQ ID NO: 1357 - DNA, 186 bp, Homo sapiens
  full length sequence of bloodCirc_03806
agaggtgtgggaaatggaactggatagactcaagaatcaggatggcgaaataaataggaacattatggaagagactgaacgggcctggaaggcagagatcttatcactagagagccggaaagagttactggtactgaaactagaagaagcagaaaaagaggcagaattgcaccttacttacctcaa

SEQ ID NO: 1358 - DNA, 438 bp, Homo sapiens
  full length sequence of bloodCirc_18891
tcactgatgaacctcaaataaatttgaagagaagtcaagaaaatgaatgggtcaagagtgatcaagtaaagaagaggaaaaaaaagagaaaagattatcaacccaactatttcctgtccattccaatcaccaacaaagagattataaaaggaattaagatcctgcagaatgcaataatacaacaagatgagcgactggccaaagcaatggtcagtgatggttcctttcatattaccctgctggtgatgcaattattaaatgaagatgaagtaaacattggtattgatgctcttttggaattgaaaccattcatagaagaactcctccagggaaaacatttgactttgccctttcaagggattggtacttttggaaatcaggttggatttgtgaagctggcagaaggagatcatgtaaactcacttttggagatagcag

SEQ ID NO: 1359 - DNA, 236 bp, Homo sapiens
  full length sequence of bloodCirc_10683
gagccaccagaaatggaactattgaaatttttcaggccagaaaacattacagtttcctcaaggccatcagtagagcagctttctagtctcattaaaacgagtcttcactacccagaatcatttaatcatccatttcatcaaaaaagcctttgtttagtaccagtcactcttttactttccaattgttctaaggctgatgtagatgtcatagttgatcttcggcataaaacaacaag

SEQ ID NO: 1360 - DNA, 254 bp, Homo sapiens
  full length sequence of bloodCirc_12223
ccctagggtggtcccaaccatgtgatgtctggagcataggatgcattcttattgaatactatcttgggtttaccgtatttccaacacacgatagtaaggagcatttagcaatgatggaaaggattcttggacctctaccaaaacatatgatacagaaaaccaggaaacgtaaatattttcaccacgatcgattagactgggatgaacacagttctgccggcagatatgtttcaagacgctgtaaacctctgaag

SEQ ID NO: 1361 - DNA, 421 bp, Homo sapiens
  full length sequence of bloodCirc_22413
gcaacagctgaacagatgcgtctcgctcaagtgatctttgataagaatgattcagattttgaagctaaagttaagcagcttatggaagtgacagggaaaaatcaggatgaatgcatagtggccctacatgattgtaatggagatgtgaacaaagctatcaatatattgctggaagggaattcagacacaacttcatgggagactgtagggtgtaagaaaaagaattttgcaaaagaaaattcagaaaacaaagagaatagagagaagaaaagcgagaaagaatcgagtcgtggacgtggaaacaacaaccggaaaggaagaggcggcaatcgtggcagagaatttagaggtgaagaaaatggaattgattgcaatcaagtggacaaaccttcagatcgtggcaagcgagcccggggtagag

SEQ ID NO: 1362 - DNA, 331 bp, Homo sapiens
  full length sequence of bloodCirc_17718
cacccatatatctcccatcagcatcctaccagcctctacagatattttagaaagaacaattagagcagctgtggaacagcacctttttgatcttcagagcagcatagatcatgatcttaagaatttacaacagcaaagtgtggtgtgtaataatgaagcagaaagtattcattgtgatggggaaggatctaataaccagattgatattgctgatgatattattaatgccagtgaaagtaacagagactgttcaaaacctgtggctagcactaatttagacaatgaagctatgcagcaagattgtgtatttgagaatgaagaaaatacccag

SEQ ID NO: 1363 - DNA, 219 bp, Homo sapiens
  full length sequence of bloodCirc_18147
agaattttagcaccctatactgattttcactacagacatagtccagatacagctgaaggacagctcaaagaagacagagaagcacgatttctagccagtaaaatgggaatcatagcaacattccgatcatgggcaggtattattaatttatgtaaacctggaaattctgggatccagtctctaataggagtactttgcataccaaatatggaaataagg

SEQ ID NO: 1364 - DNA, 475 bp, Homo sapiens
  full length sequence of bloodCirc_01647
caacatcatgacaacagagaagagtttagtgactgaggccgaaaattcacagcaccaacagaaggaagagggtgaggaagccataaactcaggccaacaagaacctcagcaggaggaatcttgtcaaacagcagctgaaggagataattggtgtgaacagaagctgaaagcttctaatggagacactcctacacatgaagacttgaccaagaacaaggagcggacatcagaaagcagaggactttcacgactattctcctcgtttctcaaaaggcccaaatctcaggtgtccgaggaagaaggcaaagaagtagagtcagataaagaaaaaggtgaaggaggtcagaaagagatagaatttggaaccagtcttgatgaagagatcattttaaaggccccaattgcagctcctgaaccggaactcaaaacagacccatctttggatcttcattcattaagcagtgcagaaacacag

SEQ ID NO: 1365 - DNA, 261 bp, Homo sapiens
  full length sequence of bloodCirc_18058
caagtcaagccagagatctgttatcaaaaatgttagtgattgatcctgacaagcggatctctgtagacgaagctctgcgtcacccatacatcactgtttggtatgaccccgccgaagcagaagccccaccacctcaaatttatgatgcccagttggaagaaagagaacatgcaattgaagaatggaaagagctaatttacaaagaagtcatggattgggaagaaagaagcaagaatggtgttgtaaaagatcagccttcag

SEQ ID NO: 1366 - DNA, 151 bp, Homo sapiens
  full length sequence of bloodCirc_16094
tctcaaagtggtgaaggaggcagtgttgactacagttatctgcaaccaggtcaagatggctatgcccaatatgctcagtattcacaggattatcagcagttttatcaacaacaagctggaggattggaatctgatgcatcatctgcatcag

SEQ ID NO: 1367 - DNA, 413 bp, Homo sapiens
  full length sequence of bloodCirc_03636
attcattggttttcaattttcaactccttcatgatggtgatcttcttggtgggcttagtttcaatgattttaatgagaacattaagaaaagattatgctcggtacagtaaagaggaagaaatggatgatatggtgagtaaacatttacattatatttgtagaaacattttaactgagtgttaagttttaaatgttgggaggtaggtcataatttcttaccggaagtctttgagtttccacaattcaggatttttagagttaagaaagatgtaaaatgcccagtgtggtctgtaaccatgccctgtaatcaaataatattaattttttttcaggaaaacataagaacattcacccgaagtgggataaataaatagtgtaacctcttgttagttcaagccaagttttgccaccaa

SEQ ID NO: 1368 - DNA, 138 bp, Homo sapiens
  full length sequence of bloodCirc_07659
gatgaaacaagtgaagatgctaactgtcttgctttgagtggacatgataaaacagaagcaaaggaacaacttgatacagagacaagtacaactcaatcagaaactattcagacagcggcttctctgttggcctctcag

SEQ ID NO: 1369 - DNA, 214 bp, Homo sapiens
  full length sequence of bloodCirc_01488
gtacaagaatattccacagatgtcctttgatgatacagaaagggagccagatcagacctttagtctgaaccgggatcttacaggagaattagagtatgctacaaaaatttctcgtttttcaaatgtctatcatctctcaattcatatttcaaaaaacttcggagcagatacgacaaaggtcttttatattggcctgagaggagagtggactgag

SEQ ID NO: 1370 - DNA, 328 bp, Homo sapiens
  full length sequence of bloodCirc_18726
agcaaattcgattaaagaatatcagaaaagtatatggaaggtgtatgtggtatcgtttacggttattaaaaccccagccaaatattattcctacagtaaagaaaatagttctgcttgcaggatgggcattgttcttattccttgcatataaagtttccaaaacagaccgagaataccaagaatacaatccttatgaagtattaaatttggatcctggagccacagtagcagaaattaaaaaacaatatcgtttgctgtcacttaaatatcatccagataaaggaggtgatgaggttatgttcatgaggatagcaaaagcttatgctgc

SEQ ID NO: 1371 - DNA, 286 bp, Homo sapiens
  full length sequence of bloodCirc_21934
atattttctaaatttggcacagtcttgaagattatcacctttacaaagaataatcagtttcaagccttgcttcagtatgctgacccagtaaatgcacattatgccaaaatggctctggatggccagaatatctataatgcatgctgcactctgcgcattgacttctccaagctcaccagccttaatgtgaaatataataatgacaaaagcagagacttcactcgcttagaccttcctactggtgatggccagccatcccttgaaccccctatggctgctgcttttg

SEQ ID NO: 1372 - DNA, 265 bp, Homo sapiens
  full length sequence of bloodCirc_11181
tgacatgaagtccgagaggagacccccctcacctgacgtgattgtgctctccgacaacgagcagccctcgagcccgagagtgaatgggctgaccacggtggccttgaaggagactagcaccgaggccctcatgaaaagcagtcctgaagaacgagaaaggatgatcaagcagctgaaggaagaattgaggttagaagaagcaaaactcgtgttgttgaaaaagttgcggcagagtcaaatacaaaaggaagccaccgcccagaag

SEQ ID NO: 1373 - DNA, 532 bp, Homo sapiens
  full length sequence of bloodCirc_17532
cgaagaatagccagaattcagcaaatcgaaaaggacatacttcgtatacgacagcttttacagtcccaagcaacagaagcagaggttagtaaattgcctttcttgtttgtgggtataaaaataggtagttattctgagaaaagaaaacatgtataatttaatgtgacaccattgaaatatagatgttctttcagagaatttaaataccgtaatttttttcgtgaaattaaattatcaaagatttggactattttgattttatctaacttttaggcagttaaaatttataaaactgtaaatatagataccttactttagctgtcagtttacatataatcaaatagttaacttaatttggctactatccagtaagtaaacttttttatagataatccatagtaagaattgataatacacatttacctgtgtttactccagaaaccccattaaagtgatagtaaaaggatacaatgaaagaggcattaagaccagggaaggtgaccacagtaaaatccgtggagctggaaagcag

SEQ ID NO: 1374 - DNA, 531 bp, Homo sapiens
  full length sequence of bloodCirc_00404
aatggaacaaaagtgggacttttaaaatgttgccctgtaagaagagaagaactacagtgacagagtccctacagcataaaggcaatcaagaggaaaacaacgtagacctagaatcagccgttaaaccagaatctgaccaggttaaggacttgagttcggtgtcactatcctgggatccaagtcatggcagagtagctggcttcgaagtacagtctttgcaggatgcaggaaatcagcttggtatggaggatacatctctgagctctggaatgctcacccagaacacaaatgtaccaattctagaaggtgttgatgtggccatctctcagggaatcaccctaccttccttggagtcttttcacccccttaatatacacattggtaaaggaaaactccacgctactggctcaaagagagggaaaaaaatgacactcaggcctgggccagttacccaagaagacagatgtgatcatcttaccctaaaggagcctttttcaggagagcctagtgaagaagtcaaggaagaaggag

SEQ ID NO: 1375 - DNA, 3050 bp, Homo sapiens
  full length sequence of bloodCirc_16639
ttgtatccgcagtgtcaagaacatgcccctagctcacaggaagcactaagtaactacttgaatgattgaatgcaaagatcctaaatttccacatactgaattttcatgaatgatttcttctcagcataggatagtaaaacaaagaaaccaagctaatggtgagttttctcctttaaagtactacatatttctgcaagaaattagccagggactggattgtttgcttaacatgctgtatcttaaaccatggattggcagtatgagacatattacttctaaatctgccagggtggctcaatgaagtccagggcacttgcttgatacaaccttctgaacctggaaacttcacctgcaaattattgctgcttctcataaacacactgatctttacaatagaaaccacaacaggttcctcattaaaatatgaagaaccaaatatcccaagcagcttattttcttctgctttagttaaaatcacctctgcatgcagagtgattgggttttgtgtgtctctagtcctgtcctcacaggctgcgctgtgccagatgcttgctgttctgtcttctggatgccagggcatacttcatagcatcagaaacttccccaggggtcctctgcatcttcatactgaccacagtgacaggtctgttggccaattcaaaagaaaggacttatgccaaattagactccagtactgaggtttccttcctttcagagccacttctaagggagccatcctgggggatttcgtccccagcatccctgccatacctcgtctgtcttcatgtacccagttaattacatccctgagtagcttgctctgatctctgatctgacagagcctctgaggaaggctgctgtaacctgtgtttccagtcaagtggatcagagatcatagcattttagaggaaaaagggaccatagagatcatggacaacctcctcaacacatagccttgttctactgtcttctaagaacacgcggtttccaaacattgaatatgccagtggtctggtatgcgaaggatggagacattgtaaatatataatactttttaaaacccaagttgaaatggatttttctttattttggggtgcttaaagagagaatatacctttgaaatggttattcatataaaaaatttaaaaacctaataataaagttgagatagaaagaggagccagggatatgtgagatcactgaagtgatttcaggcaggaaatgtcaccttttacatgaagattatagcttaattttgctacttctctccaagttctgtaaaccttatgaatagagcattgagctagaccttcttgaacttgaaaactttgttctttaaagtgtatttttctattcatccagtgcctcatttctcagtaaaatatatttttttctttatttcagtccttgccccaggaatatccttagggttaatatttgtggagagaatgtatttgttaagcaccttgtgctgcagagacatagttgctttaaaatagagcttaattattagcttttaatattttggttttgcataaaaagaaacatctaacagccatgtgacatgtaacacaccaggaatcctgtttgttcttttccagtttcactttttctgtttgtctctcttcattttagtttatattggttgtggagaaaaagggctagagaccaccaatttttatgggttaaatagacagccagtggtcagtgttgaagctggttttcaatgaacacagggccaatgatgggccagatatatattcttggcattttgagtgtatgcagattggggctggagctgggggacagaattttatacaatgtgtcggagtggagaggagatttttgtaaaccattcatgcagaaatcagtgaaaacactgttcccgtaccacttcattcagagctattgacttcatgtagctaaatgtttgatctgttttgtttgacattctgtaccctcaatcatcattacctccatgtcctttcacaaaaattgttttccaaaagatatttccaagtgtaactaaacttaggtagatatgaaaactgaggtttggtctgcaggggaaaggcaaaaagtaagttccaagggccaattatcgatggtttggtagatctggttgcaaaatgaacctgtgaaagagaaaaacatctattgtttgtccagagaagtttgaaaaacaggagaaggttttgacaaacactgaaaagttccataggaagacttagcaattcttagtgatggaggctaacgtgagtgtgttactgtgtgtgtagataagcactcttgtgctgcagggaatagcatcttaatgaaactgagattgtaattgttaacgaagaaagaatcaaaaaatgaggaagaagaaaaataggaattatgaacagtgttaaagcgtacaaatttaggggagctatattgaaattttaagttgaaaaataagttatatttcaggatttcccatttgctagacattgtgtaagaaaaaattctacgggatctgagattcattatatttgttttgaaggagtcagaaagttagaaactatttcatttacataaataaaaatgttatcttgataaaggaatgagacatttattttagatatctacagacaggtgaaataaaaatcacataacctgtaattgttgatgaaatatcatgccatatgattatagactgtatgaaaacagaatgactttactaaaataataagcaatttaggttgattgcaaatcaatatttttctcaatcttagtctcccaataaaaattatattttaaaatacttaacagttttttgtgttgaacttagaaaattagaggtaacttcacttattctttgtagatagctaccaaatttttggtgcgcctgagaaaatctatttattgcattatttataaacactaatgcttgataactgatttgaagtaattctaactcctattttcttgttttacagcttggttcatcttcttctgtgcctttcacatctattttttctcagctttttatgactgttgtggttcctctcatcattggacag

SEQ ID NO: 1376 - DNA, 205 bp, Homo sapiens
  full length sequence of bloodCirc_11038
aacacccaaacagaaactgaaggaggagccggacagagaagccagggcaggcgtgcaggctgacgaggacgaagatggagacgagaaagatgagaagaagcacagaagtcaacccaaagatctagctgccaaacggaggcccgaagaaaaagaacctgaaaaagtaaatccacagatttctgatgaaaaagacgaggatgaaaag

SEQ ID NO: 1377 - DNA, 448 bp, Homo sapiens
  full length sequence of bloodCirc_12628
gctactgtggagccgatatcaaggccctgtgcactgaagccgccctgattgcactgcggaggcgttatccccagatctatgctagcagtcataaactgcagctggatgtttcctcaatagtgcttagtgcccaagatttttaccatgcaatgcagaatatcgtgcctgcttcccaacgtgctgtgatgtcttcagggcatgcactatcccccatcataagaccactgctggaaagaagcttcaacaacatcctagcagtcttgcaaaaagtgtttcctcatgctgaaattagccagagtgacaaaaaagaagatatagaaactttaattttagaggatagtgaagatgaaaatgctttatcaatttttgagaccaattgtcactcaggatcaccaaagaaacagtcatcatctgctgctatacataaaccctaccttcattttacaat

SEQ ID NO: 1378 - DNA, 417 bp, Homo sapiens
  full length sequence of bloodCirc_20317
gttcattttccagacactgaaagagcagaatggctaaataagactgtaaaacacatgtggcctttcatttgccaatttatagagaagttgtttcgagaaactatagaaccagccgtgcggggagcaaacacccaccttagcacctttagtttcacgaaggtcgacgtgggccagcagcccctcaggatcaatggtgttaaggtatacactgaaaatgtagacaaaaggcaaattattttggaccttcagattagttttgtaggaaattgtgagattgatttggagatcaaacgatatttttgtagagctggtgtgaaaagtatccagattcatggtaccatgcgggtgatcctggaaccgttgattggagatatgcccttagttggagctttgtctatcttcttccttaggaaacca

SEQ ID NO: 1379 - DNA, 1237 bp, Homo sapiens
  full length sequence of bloodCirc_07790
aatatgaagaatcttccttagaagacatgtgaataagacttgggcaaaaacttaacaattaagaggtaaggttcaatttgtcaaaagtggcaaatcctgacatcttgagtaatactggaatataattactaatgtgggcctatgtctcatctcaaatactattatccatcatacatactgaaataaaatacataggattctggtctcccattgctaaggactataccatagtattatcttcttcatagtccatactaagctgtatatgtatgcacatgtgtttaaagtagcatttcccaaaatgattagcttttttaaaaggctctgcataaaaaaactttccattggcaagtaagtatgggaaatgttgcaagcaatatgccctttcagagaaacataattttttaaagtctaagcataaatgctgtaattctttttgaccactgtttcctatgtttagtttatcatagaaatgtttttaagtaataaatattaatatattgtattccatggaacacctatagaaatgctaaaataaagtaccagaattagttttatgtcaatatgctttttaaattatttcattttcttttaataaaatattttattaaatttataaaataaacattttattttccagagttcttttggctaaaacttattttaataaaatttacttttattttttaagttccaacctaaagctttgaccttcattttaagatttgcctgtttgtaggctgggtgcggtggctcacgcctgtaatcccagcactttgggaggccaaggcgggcggatcacgaggtcgggagatcgagaccatcctggctaacacggtgaaaccccatctctactaaaaatacaaaaaattagccaggcatggtggcaggcacctgtagtcccagctaatcaggaggctgaggcaggagaatggcatgaacccgggaggcggagcttgcaatgagcccagatggcgccactgcactccagcctgggtaacagaatgagactccgcctcaaaaaaaaaaaaaaaaaaaaaagatttgcctgtttgtgatcatgatagagcgattatgtgagcagtttgaaccatttataatattttctttagaggtttaacttgacagtctataatcttttgtatttagaatgagagggagaaacttcaaataaagatagatgagatggataaaatacttaagaagatcgataactgcctcactgagatggaaacag

SEQ ID NO: 1380 - DNA, 1074 bp, Homo sapiens
  full length sequence of bloodCirc_03959
gacatttctgatttatttgcatccttgaagagcatctgtagaagaggaagtaaaagatgggtgtgaaaacatttactcatagctcctcttcccacagccaggaaatgcttggaaagctaaatatgctgcgaaatgatggacatttttgtgatatcactattcgtgtccaggacaaaatcttccgggcacataaggtggtactagcagcttgcagtgatttctttcgcaccaaacttgtaggccaagccgaggatgagaacaagaatgtgttggatctgcatcatgttacagtgactggctttatacctcttttagaatatgcttacacagccactctatcaattaacacagaaaatattattgatgttctagcagcagccagctatatgcaaatgttcagtgttgccagcacctgctcagagttcatgaaatcaagcattttatggaatacacccaacagccaacctgaaaagggtctagatgctggacaagaaaataattctaactgcaattttacttctcgagatgggagcatttctcccgtgtcctcagagtgcagtgtggtagaaagaaccattcctgtctgccgagaatcccggagaaagcgcaaaagctacattgttatgtctcctgaaagtcctgtaaagtgtggcacacaaacaagctcaccccaggtattgaattcttcagcttcctactcagaaaatagaaaccaaccagttgactcttccttagcttttccttggacttttccttttggaattgatcgaaggattcagcctgagaaagttaagcaagcagaaaatacccggactttagaattacctggcccatctgagaccggtagaagaatggctgattatgtgacttgtgagagcacaaaaactaccttgcctttaggtaccgaagaagatgtccgggtcaaagtagaaagattaagtgatgaggaggtccatgaggaagtgtcccagcctgtcagtgcatctcagagttcgctgagtgatcagcagacagttccaggaagtgaacaagtccaagaggaccttctgattagtccacagtcttcctctatag

SEQ ID NO: 1381 - DNA, 584 bp, Homo sapiens
  full length sequence of bloodCirc_08659
gccaaattaaagaagcggaagcctcgggtaaagaaggaaaacaaagtgcccaggctgaaagaggagcatggaattgagctttcatctcctaggcattcagataatccatcagaagagggagaagtgaaagatgatggcttggaaaaaagtccaatgaaaaaaaaacagaagaagaaagagaacaaggagaacaaggagaaacaaatgagttctaggaaagacaaagaaggggacaaggaaagaaagaagtcaaaagataagaaagagaagcctaaaagtggtgatgccaaatcttcgagtaaatcaaagcgatctcagggtcctgtccatattacagcaggaagtgaacctgtccccattggagaggatgaggatgatgatctggaccaggagacattcagcatatgtaaggagaggatgaggcccgtgaaaaaggcactgaaacagctcgacaaacctgacaaggggctcaacgtgcaagaacagctggaacacacccggaactgcctgctgaaaatcggagaccggatagccgagtgccttaaagcctactcagatcaggagcacatcaaactctggaggag

SEQ ID NO: 1382 - DNA, 352 bp, Homo sapiens
  full length sequence of bloodCirc_21499
ccaagttctatagaaattttagagtattcatcagatagtgaaaaagaagatgatttggaaaatgtcctactcattgattcagaatcccctcacaaataccacgtgcagtttgcatcggatgcaagacagattatggagagactgatagatccaaggacaaaatcaacagagaccattttgcatacacctcagaaacccacagctaagtttcccaggactccagaaaattcagcaaagaagaagcttttaagaggtggactagcagaaagactaaatggactgcagaatcgagagagatctgctatttctttgtggagacatcaatgtatttcttaccaaaagacactttcag

SEQ ID NO: 1383 - DNA, 273 bp, Homo sapiens
  full length sequence of bloodCirc_14410
aatgtgtgaatgacaactactggtttgggagggacaaaagctgtgaatattgctttgatgaaccactgctgaaaagaacagataaataccgaacatacagcaagaaacactttcggattttcagggaagtgggtcctaaaaactcttacattgcatacatagaagatcacagtggcaatggaacctttgtaaatacagagcttgtagggaaaggaaaacgccgtcctttgaataacaattctgaaattgcactgtcactaagcagaaataaag

SEQ ID NO: 1384 - DNA, 203 bp, Homo sapiens
  full length sequence of bloodCirc_05272
agatagaaagaagagaattgaaaagccgagaagatttagcagaagtttaagccggactccaagtccacctcccttcagaggcagaaacacagcaatggatgcacaggaagctttagctagaaggttggaaagggcaaagaaattacaagaacagcgagaaaaggaaatggttgaaaaacaaaaacaacaagaaatagctgcag

SEQ ID NO: 1385 - DNA, 460 bp, Homo sapiens
  full length sequence of bloodCirc_20253
tgaacagctctgcgctttttgttactgtggggaaaaaagttccttaggacaaggagacttaaaacaattcagaataacgcctggatttatcttgccatggagaaaccaaccttctaacaagaaggacattgatgacaacagcaatggaacctatgagaaaatgcaaaactcagcaccacgaaaacaaagaggacagagaaaagaacgatctcctcagcagaatatagtatcttgtgtaagtgtaagcacccagacagcttcagatgatcaagctggtaaactgtgggatgaactcagtctggttgggcttccagatgccattgatatccaagccttatttgattctacaggcacttgttgggctcatcaccgttgtgtggagtggtcactaggagtatgccagatggaagaaccattgttagtgaacgtggacaaagctgttgtctcagggagcacagaa

SEQ ID NO: 1386 - DNA, 175 bp, Homo sapiens
  full length sequence of bloodCirc_12867
tgtggcaaagcgctccctggcctttcaaagcaagaggactgctgtggaactgtgggtacctcctggggctttaacaaatgccagaaatgccccaagaaaccatcttatcatggatacaaccaaatgatggaatgcctaccgggttataagcgggttaacaacaccttttgccaag

SEQ ID NO: 1387 - DNA, 226 bp, Homo sapiens
  full length sequence of bloodCirc_18343
gaatacaggagtttccagaaaatataaaaaattgtaaagttttgacaattgtggaggccagtgtaaaccctatttccaagctccctgatggattttctcagctgttaaacctaacccagttgtatctgaatgatgcttttcttgagttcttgccagcaaattttggcagattaactaaactccaaatattagagcttagagaaaaccagttaaaaatgttgcctaa

SEQ ID NO: 1388 - DNA, 294 bp, Homo sapiens
  full length sequence of bloodCirc_16491
aattcggttccctcaaaattataaaggcaggaaagctcaagacaaagaaatccaacaaggctagtgatttcagtgatatggagaattggccaacaccaagtgaattagtgaacactggatttcagagcgtcctcagccaaggaaataaaaagccacaaaatagaaaagaaaaagaagagaaggttgaaaagagaagtaacagtgacagcaaagaaaaccgggaaacaaaattaaatggtcctggtgaaaacgtcagtgaggatgaggctcagtcaagtaatcaacgtaagagag

SEQ ID NO: 1389 - DNA, 174 bp, Homo sapiens
  full length sequence of bloodCirc_23279
gataacaaagctgatgtaattttaaagtacaatgcagatgaagctagaagcctgaaggcatatggcgagcttccagaacatgctaaaatcaatgaaacagacacatttggtcctggagatgatgatgaaatccagtttgacgatattggagatgatgatgaagacattgatgat

SEQ ID NO: 1390 - DNA, 100 bp, Homo sapiens
  full length sequence of bloodCirc_04762
tgatgtaaattggagtcaaccaggtgaaaagaagttaactgggggatctaactggcaaccaaaggttgcaccaacaaccgcttggaatgctgcaacaatg

SEQ ID NO: 1391 - DNA, 301 bp, Homo sapiens
  full length sequence of bloodCirc_03534
gtgaagtggatcctaaagagaggatagcacgccaacgaaaattattacagaagaaacttggccttaatatgggagaagcaattggaatgagtactgaagaacttttcaatgatgaggatttggattataccccaacttcagcatcctttgttaacaaacaacctactcttcaggcagctgaattgattgactcagagtttcgagcaggaatgagcaatagacaaaagaacaaagctaaaagaatggccaagttatttgcaaaacagagatccagggatgcagtggaaactaatgagaagag

SEQ ID NO: 1392 - DNA, 556 bp, Homo sapiens
  full length sequence of bloodCirc_12274
gagctcttgaaacaacatcaaagtgacaccttgcaattagaagagctgagaaaaaccaaagaggtaagctttttcatcctttcctgtggacttggtatattacaaatacaccaataaaataacaagctgtcagtataatggaatcaatgataatttccccaaagccaataagaaatggaagacctaaagctgagtttactggattcaataagttaaaaagaatttttgaaattatctgtaaaataaagccagtgggtctttttaaagtctgatttgaacaaatagatcagcaatatactatgtgatcttcaatgttgaatgactttcatttctagcaaggttcaaaccacaaatgatctttcagttataaaacaccaagttcttccctttgagctctgaaaagtataaaactgtctcctttgaaactctgtcaccaagcccctccttaagctctgaatgtacctcacacatgataacttcctcagggactctattctggggcaaattatggcagtctgtgggagacaactgaagaggagccgttcaaatccacaag

SEQ ID NO: 1393 - DNA, 572 bp, Homo sapiens
  full length sequence of bloodCirc_17490
ggccagctctcaatgttgcaagaaaaaatagaccatttggagcgtttgctagctgagaataatgagatcatctcaaatattagagactcagtcatcaatttgagtgagtctgtggaggatggtccgaaaagttcacaaagcaatttcagccaaggtgctggctcacatcttctgccctcacaattatccctctcagttgacactgcagactgtctgtttgcttcacaaagtggaagtcacaattcagatgtgcagatgttggatgtttacagtctaatttcttttgacaatccagatggtggagtttggaagcaaggatttgacattacttatgaatctaatgaatgggacactgaaccccttcaagtctttgtggtgcctcattcccataacgacccaggttggttgaagactttcaatgactactttagagacaagactcagtatatttttaataacatggtcctaaagctgaaagaagactcacggaggaagtttatttggtctgagatctcttacctttcaaagtggtgggatattatagatattcagaagaaggatgctgttaaaag

SEQ ID NO: 1394 - DNA, 573 bp, Homo sapiens
  full length sequence of bloodCirc_07235
ataacatagatcatcagtagaaaacttcttgaagttgttcaagaaaaatttgaaagtagcaaaatagaaaataaagaattaacagcagatacagaggacagcatggaagtgttgtcttaggaaacagaacacagcagtgaaaaaacagacaaaatccgctcagatacaactgcagctgataatgttttccggcttcaatgtctttagagttgggatctcttttgtcataatgtgcattttttacatgccaacagtaaactctttaccagaactgagtcctcagaaatattttagtacattgcaaccaggaaaagcctctttagcttatttttgtcaagctgattccccaagaacatctgtatttcttgaagaactgaatgaggctgttagacctctgcaggactatggaatttcagttgccaaggttaattgtgtcaaagaagaaatatcaagatactgtggaaaagaaaaggatttgatgaaagcatatttattcaagggcaacatattgctcagagaattccctactgacaccttgtttgatgtgaatgccattgtcgcccatgttctctt

SEQ ID NO: 1395 - DNA, 553 bp, Homo sapiens
  full length sequence of bloodCirc_00199
ggaagaggaagaacgtctgagaaataaaattcgagctgatcatgagaaggccttggaagaagcaaaagaaaaattaagaaagtcaagagaggaaattcgagcagaaattcagacagagaaaaataaggtagtccaagaaatgaagataaaagagaacaagccactgccaccagtccctattcccaaccttgtaggaatacgtggtggagacccagaagataatgacataagagagaaaagggaaaaaattaaagagatgatgaaacatgcttgggataactataggacatatgggtggggacataatgaactcagacctattgcaaggaaaggacactcccctaacatatttggaagttcacaaatgggtgctaccatagtagatgctttggataccctttatatcatgggacttcatgatgaattcctagatgggcaaagatggattgaagacaaccttgatttcagtgtgaattcagaggtgtctgtgtttgaagtcaacattcgatttattggaggcctacttgcagcatattacctatcaggagaggag

SEQ ID NO: 1396 - DNA, 1091 bp, Homo sapiens
  full length sequence of bloodCirc_01097
gttcacatgatgctcttatagttggtaagttttatgaagtgtttgctgaggaattctgtcatctttaacagtaagtacctacttataatgaatgcaatgtagaaagagagatcaaaatatcttgagttataaattcaaatagaaagaaaattatgatgagtttaggccaggatatggtgaaactggcatcgtcatatgccaggttattgagtaaccttcctcaaaagttctttactatctttgaaccactacaaatgcataatcgttcaacagtgtcaaaaagtatttatttgaatgtggtgggagaatgaaacttcttctttgggttataacctggagtatgcttccagatggtgattgtgcccatttgtacaaatagaaagctacaagaccagtcttccgagcccatgtctgtgatctgcctatgtaagaagaatagttttgtaatagagtttgcttccaagggaatctctatggcatagtattcttacatccctttttatacatctggacactgagacacggagggtttaggtaacttgcccaagaccacagaatggggtagcctgggtctaagcaggcaatctacctatcagtggagactgtgcactttaacaatcaataaatggacaaaaggacgtaaatatataattcaacaagagagaaaattccagtattgtcacagtgaaatgcctgtgtgttaagccttaggcgagagacatgggcagggccatggagagccagtggccagctgtcccatcgcacttctcacttacttgtggaaaggctgatggtggactaaaggttacaaaagaggtcagctcaccccttaactataataaccctgtgggagtgagactaatgctatagaaacccagagtaaagcagaatgtatagttacatcttttaaaaaaaaaagcattggcaatctgtagtgggactggatactaagatagaatttaaaacctgtgagttatattttccacgcatttaattaccttgttttactgcctaggcactttacttggtacgatcatctttattttaatcatcattttcctctattggataattttcaagcacagaaaaag

SEQ ID NO: 1397 - DNA, 606 bp, Homo sapiens
  full length sequence of bloodCirc_08154
actgcaaatgaacactggactccatgcatattaaatgaagcagacaaaattatatacaagcttatacgacttgatagtcttagcgcctactggaatgtaaattgcagcatgtcttaccagagatcaagggaacagattttggatcagctgaaaaatgaaattcttacaagtggaaatatacccccaaattatcaatacattttccagccaatatcagcctctgcaaaactctacatgaatccttatgcagaatcagagctcaaaacgcccaaactggattgcaacatagaaatacaaaatattgccattgaactgaccaaacctcagtacttaagtatgattgaccttttggagtcagtggattatatggttaggaatgcgccttataggaaatacaagccttatttaccacttcataccaatggtcgacgatggtggaaatatgcaattgattctgttcttgaagttcatataagaaggtatacacagatgtggtcatggagtaacataaaaaagcacaggcagttactcaagagttataaaattgcctacaaaaacaagttaacacagtctaaagtctcagaagaaatacagaaagaaattcag

SEQ ID NO: 1398 - DNA, 360 bp, Homo sapiens
  full length sequence of bloodCirc_01423
gtagagtacagagagatggatgaaagcttggccaacctctcagaagatgagtattattcagaagaagagagaaatgccaaagcagagaaggaaaagaagcttcccccaccaccccctcaagccccacctgaggaagaaaatgaaagtgagcctgaagaaccatcggggcaagcaggaggacttcaagacgacagttctggagggtatggagacggccaagcatcaggtgtggagggcgcagctttccagagccgacttcctcatgaccggatgacttctcaagaagcagcctgttttccagatattatcagtggaccacaacagacccagaaggtttttcttttcattagaaaccgcaca

SEQ ID NO: 1399 - DNA, 326 bp, Homo sapiens
  full length sequence of bloodCirc_18273
aatatcctccgaatcctaaatctagagctccaaggatgctggtcattaagaaaggtaatacaaaagacttacagctatctggattcccagtagtaggaaatcttccgtcacagccagttaagaatggaactggtccaagtgtttataaaggtttagtccctaaacctgctgctccacctacaaaacctacacaatggaaaagccaaacaaaagaaaataaagttggaacttctttccctcatgagtccacatttggcgttggcaactttaatgcttttaaatcaactgccaagaactttagtccatctacaaattcagtgaaagag

SEQ ID NO: 1400 - DNA, 259 bp, Homo sapiens
  full length sequence of bloodCirc_02982
gatactgctggtcaagagaggtttagaacattaactcccagctattatagaggtgcacagggtgttatattagtttatgatgtcacaagaagagatacatttgttaaactggataattggttaaatgaattggaaacatactgtacaagaaatgacatagtaaacatgctagttggaaataaaatcgataaggaaaatcgtgaagtcgatagaaatgaaggcctgaaatttgcacgaaagcattccatgttatttatag

SEQ ID NO: 1401 - DNA, 203 bp, Homo sapiens
  full length sequence of bloodCirc_09356
ttaacttaccaagactggttacacctggagctggaaattcaacctgaagctgatgctctttcagatactgaacggcaggacttccaccagtgggcgatccatgagcactttctccctgagtcctcggcttcagggggctgtgacggagacctgcaggctgcgtgtaccattcttgtcaacgcactgatggatttccaccaaag

SEQ ID NO: 1402 - DNA, 168 bp, Homo sapiens
  full length sequence of bloodCirc_02496
aattcctcagagagagaagactgtaataatggcgaaccccctaggaagataataccagagaagaattcacttagacagacatacaacagctgtgccagactctgcttaaaccaagaaacagtatgtttagcaagcactgctatgaagactgagaattgtgtggccaaa

SEQ ID NO: 1403 - DNA, 6026 bp, Homo sapiens
  full length sequence of bloodCirc_02437
cacagtgcctggctcatggtggaccagagacagatggatggactgttttttgatgtgaagactgaattagccctggcagtgctgtttcccagggccctatctctgggagtcctcctgctggaagggaagtgctctcatagctgatagttaagacatgtacagtcatgcattgcttaacaatggggatacattctaagaaatgtgtccttaacacaattttatcattgtgtgaacatcatagagtgcacttaacacaaacctagatggaatagcctaccacacacctaggctttatgacataacctgttgctcctaggctacaaacctgtacagcatttactgtactgaatacagtacagtactgtactgaatacattgtgtaggcagatgctacacaatgccaagtatttgtgtatctaaatactacattgtatagtatttactgtactgaatacatggtgtagacagatgctacacaatgccaagtatttgtgtatctaaattctacattgtatagtatttactgtactgaatacatggtgtagacagatgctacacaatgccaagtatttgtgtatctaaacatagaaaaggtacagttaaaaaatgtagtataaaagattaaaaattggactaggcatggtggctcatacctgtaatcccagtggtttgggaggctgaggtgggaggatcacttgaggccaggactttgagaccatcctgggcaacatagtgagacccagtctctacaaaaaaaaaaaaaaaaaaaatgagctgggtgtggtggctatgtgggaggctgaggcgggaggatcacttgagcctagaagtttgaggttatagtgagctatgattgtgccactgcactccagcctggatgacagagtgagaacctgtgtcaaaaaaaaaaaaaaaaaaaaaaagataaaaaatgttacaccacctctgtggagcaattactgtgaatggagcttgcaggactagaagttgctctaggtgaatcactgagtgagtggtgagtgaaagtggagggctaggacattactgaacattactgtaggctttataaacactgtacacttaggcaacactaaattgattttaaaaatttcttttttcaataaattaaccttagcttagtttcttttttattttataaacttttttatttaaacctttgattttttttttttttttttttttgagacagtttcattcttgtcacctaggctggagtgcagtggcgtgatcttggctcactccagcctccgtctcccaggttcaagtgattctcctgcctcagcctcctgagttggtgagactacaggcatgtgccaccatgcctggctaattttttgcatatttagtagagatggggtttcaccatgttgaccaggctggtctcgaacacttgacctcaggtgatccaccagcctcggcctgccaaagtgctgggattacaggcgtgagccactgcacccagcctttgattctttttaataacacttatctgaaaacaaacccattgtatggctgtagaaaaagattttctttatatccttattttataagctttcttctatttttacaattatgttattattattttattacttttttgttaaaaacgaagactcagacacacacattagcctaggtctgtcagaaccatcaatatcattgtcgtccacctccacatcttgtcccactggaaggtcttcagggataataacacacatggagctgtcatctcctatgagaacaatgcctccttctggactgcctcctgaaggactttcctgaggctgttttacagttaattgtgtgtgtggttttttttaataaatagaaggaatacactgtaaaatcatgataaaaagtatagtgtagtaaatgcttaagccagtaacatagtcatttattatcattgtcaactattatgtactgcacataattgtatgtgctagacttttatatgaccgtcagtgcagtaggtttatttacaccagcatcacctcaaacacgtgagtaatgtgttgcgctgcggtgttatgatggctacagcgtctctaggtgataggaattttcagctccattataatcttatgagaccaccattgtatatgtggtctgtcattgactgaaacatcgttatgcagtgcatgactgtacttcagaccttttcatgtttttccctactaagaaatcagtgtcaattaaagtttatgtaaaccatctttaatgaaaagtataaacattatttcattcaacaggtctctggaaaagtttctttgatgtccacaattcctgtgaatcaagatggactaattataatgtagagttcatgtctagacgctcttgtaaattgctacagaagtatttcccttatctgtttcagctgctcttcgctaggccaaatagtatcccagctttctgccagctactagctacctgtagaggtatatgaagtaggtgtgcttttccagttttactgtatattcctatacttaataatcaccaaactcttgcaggcccttaacatatgttagtaatgagcatcctttggttttatcactttttaccatttttcttgcctgattcatgcattaaagtgaatgaacaggggtagctgcttcctaccagaagccttggttttctggggaaatttgtaaagatctctagattagttcttgatttggcatgactgattaagcaagcagctgttcactaagaggcaaagctgagagtagaacaatttaattggcttctatctgttgagcttttaatggaagtcacagcttgaatatatggagctctttatttagttttaaatgaaacatttttccaaagggagactctaaacatatatcccaaagtcttacctgataataattctgttcaaaatataatattcatccattagaacaaagacttaaaaactcgatttttgggcgagggtgggatgatacattttttaatggtgaattgtttgagtgcttttaaatacagtagttaaatgaacaattcataaaatggataaggtatgatatgttttatgacaccttttaacattcatgaaataaatgctttgtatacattgaattttaacaaactaaatgagcagcccgtgcccaccttctgctctaggatcagcagagagcatacgaaagtcttcaggggaaacctcctcacatttaagattagattctccattctcttctgattactgattatattttttttccaattttgtgtccatctggcctccagatacctatttgctttaatcttagaaaagcattattctccttacatcccacttagcaaattatggtaatgcttaatttatgtacaaaacttttatgtattgtttggttaatattaaacctaggctaaaagaccacaaattaaaattttaatacccaataaacatatgttgaattaaaaagaagtaaaagagcagtaaagttaatggagtctcatagagaagaattgtaatatcaatatttttaccaagtacacacacacacacacacacacacacacacacacacacacaaagaatgaggaaagaattcattatagacatatgaattctgatggaaggggccctgtgggagattgattcttattacgatatcctggttggaagggaatgaagtggggttattgctagtgcagtcaatgacttggcttttctctggtgaattgatttcagtaggtgactttatttctttgcattaggcagctggaaatgtgtattgatttatttctttttcatttgagaatcagctttatcaaagatggagccatagaaatgctgtatttgctggatatgagcaaatgccttagtgcctttttttttttttttttgctctgaatgttcctaagatttttaggagccaaataaagttcagctcaatgaaatagaaaacacactttgagtgtgcatatatgcatagtactattctttctgctaactcgattgttaagacctgaagctcttttataaaaatctttttttttttttttttttttaataagggatacaaagccctgcaggccttttgctccaagaatgtgtgtgattgaagagcatgttttaaaagttaaattctcatttgtgcagtgacggtgttagcggtggagggtgttcaggttcttggcattttgaacaaagaattagacaaaatgcacaaagcaaggaaggaatgaagcaatgaaagtagcgatttattaaaaatgaaagtacactccacagggtgggagttggtcctaccataggggctcaagagcccggttacagaattttctagggcttaaatacctgctacaggtttcccattggccacttgttgtacaccccatgcaaatgaagtagtggcccacaatctaggccggttgtggtgcctcacgcctgtaatcccagcactttaggaggctgaggtgggcagatcacgaggtcaggagttcaagaccagtctggccaacatggtgaaaccccgtctctactaaaaatacaaaaattaaccgagtgtggtggtgcgtgcctgtaatcccagccgctcgcgatgatgaggcagcagaattgcttgaatccgggaggcggaggttgcagtgagctgagatctatcgcaccactgcactctagcctgggggacacagcaagactccatctggaggcggggttgggggcgtggcggaggggaggggaagttacacttctgtgcaaaggaagacttggctggcagtcagtcagattggttggggaaagcaaccaatcagaggctgaaatgaagttataaagttatactcctatgtaaacgtctgattggttgcggaaagcaaccaatcagaggtactttcagttttccatttgccactcagaaaagtgagggaggggttttcaaagcgagtaacctccagttattttgttagttaggtgtgtaaagttgggcttttctgtttgatttagttctaggaagtcagtatgaatcggccttaggttccctgcctccagaccctattgtcttgcctcaacagtgcaatggctctttgctaagactgtgttcttcttaagattttaattttgttttaaatgttgtttgtcctgctccaaaattagttttttaattatggaattattttttgttttgttattacaggcagtgttagttctatggtttttggcttgattgtttcttagaaattatgtaaccaactctttcatatcatagatgagaaattgagggataaagaaatcgatttgtcataaatttaattgaaatattattagaagaatagtttttacttatagtacttgaaattctctgttaatattaagacttagataattttgaatatcatgatgttaaaattataaatgacacctctaatattgagatctttaagataaaacagacataagatacatgacaaatagatggtaaaggtgaagaaatatacaaaaggtcaaaaattcttatagtttatattcttaacatttgttctaaattttaaaaattactaaaattacaagacatatttcttaaaataaaaaaattactctaggtttattatgagacaacaatttatagctgtcatttatcttaacaggttgaagaaatatggagatcaacacaaaactgctcatcagtgttacctgtatcagctttttcacctttcagcttcttttctactttgtaagttactggttttcagcaaaagtttctccaggtttcaatagtctcagcttcaaaaagaagattgaatggaactcaagggtagtatccacatgccattctttggtggttggtatttttggcctgtacattttcttattcgatgaggctactaaagctgatccactttggggtggtccatcacttgcaaacgtgaatattgctattgcctcaggctacctcatttctgatttgtccattataattttgtattggaaagtgattggtgacaaattttttataatgcatcattgtgcgtccctgtatgcatactaccttgtactg

SEQ ID NO: 1404 - DNA, 165 bp, Homo sapiens
  full length sequence of bloodCirc_14948
tctacaaataagaaacctcgaaaatctccaggtgagaagagcagaattgaagctggaattagaggagcaggccgtggaagagctaatggacaccctcaacagaatggggaaggggagcctgtcacattatttgaggtggtgaaactggggaaaagtgcaatgcag

SEQ ID NO: 1405 - DNA, 316 bp, Homo sapiens
  full length sequence of bloodCirc_16191
gccctcagttatattaggagtaaccaaccctttttttgctaagacactccagcactggccacacattattcgaataggagaccttaaacctacaggtgaaattcctaagcaggttaaagtgaaaaaactgaagaatctaaagactctggattccaaacctggagtttatacttcatataagccatatttaaatagagatgaagagatcataaaacaattacagaagggtgtacaacagaaacgtccttctgaggctcaaagtgttattcttcgacgctattttttggaactgacacaaagtttcatcattccatta

SEQ ID NO: 1406 - DNA, 210 bp, Homo sapiens
  full length sequence of bloodCirc_00019
gtaatctatttaaagaagacaccagaagaagcctacagagcactcctgtctggctcaaaccccccctatcttccattcagggatgcttcctttggaaattgcacttacaatctcaccattctcgactgtttgcagggaatcagaaagggattacaacatggattttttgactttgagacatttgatgtggatgaatatgaacattatgag

SEQ ID NO: 1407 - DNA, 11435 bp, Homo sapiens
  full length sequence of bloodCirc_17405
gaactacataagggagaatgttccagtgtgtcagcatttttttaattgcaaatcaattaaggacatagtatctgcatggaatgtatgtggacaagatggagcaatttgatcaggtgataatgcaattaggtgtattcgggcttgggtgaacaatcgttgtaagggtattgcttaatcaaatgatgccaataccaaaaggggttacaaattaagtatcttattgctctttatttacttattaggctttttttattaatgacttagattaagacatagaaggcttatacacataaacgtcatcattgaaacaaaggtgaggataactaatatgttgaatagcaaggctagaaataaaggtgaagaaaactacaaaaatattagttttgtaaaaaaagttattgtaggtagaaagaatgtctagaagcttagcaaattgatacttacagtgaataaatgtttagtcttgaactttgattctcaagagagatcaggactagaaagatctagtttaataccagtttgcaaagcattattttagagagttagttttcctgaagtacaatctacatgctataaaatgtatcttttttagtatattgctctcagacagtcataaccactaccacaattaagatacagccatatagcccaggctggcacggtgactcacacctgtaatcccagcactttgggaggccgaggtggttggatcatctgaggtcgggagttcgagaccagcctggccaacatggtgaaaccccgcctctactaaaaatacaaaatttagccaggcgtggtggcatgtacctgtaatcccagctactcaggaagccgaggcgggagaattgcttgaacccgggaggcggaggttgcagtgagctgagatcatgccactgcactccagcctgggtgatagagtgagactctgtctcaaaaaaaaaaaaagatacaggccatttccatcattccaaacaattccttcatgccccttttagttgactcctcctcttaccccagccactggtaacttctgactgttttctgaccccatagttttgcaaagcttccttcacgtaactttttaagaatttgatcttcataagatctctacaacattaatattatcaacagttctattttacaatagaagaaactagtgtttaaagttaaacagctttccaaaacctacactatatgagttgtggagccagaacctgagcccccattttctaacccaggatcctgaatacatcccttaacccttccagctagccccttgttccaagagctctgctcttttctgcattgttcagttacctccaggttgatcttatattaggagccagtgtttaacattcatagtaatgtactggagggacaagagcagtgtttctcaatcttttttgcattattgttcttctaaagagcgtttttagacttttttccctaatcattccttgcccccattaaattttaacaccgttaatatagtgtatatctgtatgtataatgtatgtctgtacttaatagataacccgtctttgtaatttcagcctctgaggaccagcctctcaaggcctgagaatatctatctatgactttcaactttactcatcaaaacacaaaattgtaacaaatttactgtaaagatctcagttagctgcatttgggattctattatcaggcagtacttcattctattatagaataagcgtcctaggaaatcaagcagaggaagttggcttcataggcaaaaaaaaaaggactaaagaaagcagaaacaaagaaaaagtggattggtagtttcaaagttactttccttgtatggcaggaacaggtagccaaaaatataggttaaagatcagaacagacagaaatttattattatgccaattgaaactggcctgtttcggaaattaggctatctctctctcctgatttttctggcagtccggtaacaacttggttttagttatgtggaactttagcatgggcgacttcatttctgtgtgttttttgttgttgttgttttgagacagtttctctctgtcacccaagttagaatgcagtggcgcgatcatagctcactgcagtctgcctgccaggttcaacacattctcatgctttagcctcccaagtagctgggactacaggtgcacactaccacgcccgactaagtttttatattttttggtagagacagggttttaccatgttggccagcctggtcttgaactcttggcctcaagtgatctgcccacctcagcctctcaaagtgctgggattacaggcatgagccactgctcccagttgggacttcatttttgaagtttaggctggtcatcttgggcctcgtgcaggtgcttagtccaaaacaatggcctcctataatttttatttaataattttccccttttggtcaggccaaagcctgacctattgacctaggtcaatagtgctgctttcagttgtgctgggttgcagtttcaacatgtccttcataggttatggtgtatatatgatcttgcatttctttgagtttttgtcattccagctgaaaagactgcatttgacatttgaagggtggctttatgcaagcacttggaagtttgtaaggggacacagtgtactagggagactggtactattactttcaggaggataataactgataataactctggctccttagccagagtccttataaaccaaaccaactaaaatcaaataaataaaaaaaaagctgagccagacaaggaatttacctgttttaaccaagtagcccgtttgttaatgttttgtaactgaatctctccaatacccagcatatttatctatatgcagcaagaagtgtcagcaactgcacagattccttattttcttttctgttactacattttcaaataagtagatagtaattctatcatctggcatcccaggaatgtgttaaattaaagcagagggtgctaattctataaaagagaccatgttgggaatgaagtttttggtgtcaccaaaaaaaaaaaaaaaaaaaaaagaacgcgggagcaaatgatctctcagcaaggccagctttactttctgcagaaagggtgctacttaatagctatccagccacaagagcacaccggacagaggagactgagttatttataacctgatgcatctgccctactgctgtgtccagtttccattggctggaataggacctcgcattttacactttacctgattggctattagcttaaaacattgttaattaggtaaggggaatagaacaaagaaagaaaaggaagttgcccagggatagttaaggaagcatctccaaataaggtatggcatgtactatgggctggggcttgtctagttctatccaggcatgccagagcaagctagaacagctgatttggattacatatatatatatatatatatatatatatatatacacacacacacacacacacacacacagatactatgtgtgtataaatatactatgcatataatatatactatatatatatagtctgtgtatatacacacatagaatacatagtatatatgtattctatgtgtatatatatatacacacacacacatagaatatgtagtatatatatatataatatatatatacttatatatatatatacaaccacatagtatatatatatatactaatagtggttgcaatcttatagtaagaaaatgtgactttttataatgtttgaagaagaacttccccatttctcacagaccactagtacaatttgaacaaacagtcgcattagggatgttgctaaagcttcccgctaggtgcactgtaggatctcttagattgtataaatatttgggtttgatatgagagatccaaccttgtcaagtgacccccaaaaactactgattggggaattctaactacagccttacccttccaagagaaagaagaaggcctacatatggaaaaattaagaggggcaagagtcttactacgatagggagtctcattccatgcatcttgggaaaaactccacagcatgaagttggcaacttctcgtcctgatttgcagttgaatgtctctggttgtgctagcaggcattatattcaactccgcatgtagttcacacatcaggcatgagacttgtcctttgaaatttatgttgagttgtccagtttagcagtttttgttcttagttgtagccagattttggaggaaactggaagaatttaggatccagttcagtctacagttgataataaaaactcaaaaacaatgaacagagctacaatctaattacaggtataatgtagttttcttttgaaacataatgtttctctctacagtcactcccatttctaccaaagataatcagggtaagactaatttgtttgcaaaataagtttagtctcataaaaattgccctgaggtatttacataagtgcagcaagaataacccacagaggttccttttacatttgctttagtagaattttgacaagggatctcagattgaactttttttttttttttgagacagagtttcgctcttgttgccgaggctggagtgcagtggcatgatctcggctcactgcaacctctgccttctgggttcaagcagttgttctgcctcagcctctcgagtagctgggactataggcacccaccaccatgcccagctaattttttgtatttttagtagagacagggtttcaccatgttggccaggtgggtctcgaactcctgacctcaggtgatctacctgcctcggcctcccaaagtgctgggattacaggcgtgagccaccatgccctgccagattggacttttaaaagcatcttaactctaggaagtcaaaccaatgcagacatcggactttgcctgcggcatctaatatcttgaggttcctgggcctgccaggaagtggcaactttttactcactggctataaggcagggaacccttgaagctaggcagtctatccacattttcaaataggatattccagtcaaacccttggtaatagaaccaatgtttccagttacatgatgttataaagagggcaaattcttttttttaaaagaggaactagggtcttgctctgtcacccaggctgcagtgtagtggtatgatcatagcttgctgcaccttcaaacttctaagctcaagaggtcctcccacttcagcctcctgggtagctggaaccataggcgcatgccatcatgcccagctaatttttaaaatgagggtctcactatgtcgcccagaatgatctcaaactcctggcctcaagtccacctcccacacagtcttcaaagtagttgagattgcacatgtgagccaccatgcccagcaagagcaaattcttattgaacttatgcaaataatcatagtgctgtaaaaataaaacatagtatagtttttgaatttcagaggtgtcaggtagggaggagaaacaaatgtttccatttttgtttacagaagtatcctttaccaaattgctgtaaactatggatagtttaaaagagagagaaaaaaaatgtgtccttcagtctgaaaaacaaagcattaaaagaaccagcaatatttcaaattttttaaaagctttaaaaattcataattcttcttcatcagttcatttagtctcatgtaattaattcttgctctatttgagcttagttagtagtttcacaaactcatcagtttcttcattagagttctagaaattctcacgcagtccagtgttatctcaaggttagcagaaacctgaacttgccagagttcctcccatcttttctgtgaaccgtcttgaagacacatgctttaagatcacagttgtttacagaaagcttttagaaaggcatcagaataaagcaattaactgtggacaagatttaaaatggccatgttagaaccatgatgagaatcctttataataatgatataattgacaagcaagtttggttattcctgtggtgtacaacattttaacagaaagttatgactgatagcacaacagatttatagaaatctcatatagtttttggagcacatatcaataacatatccatacaattggaactcaaagattaaacatcatttcttacttgacagtgtttccacatataatttaacatctcagataagcctaattgatttaatatttctctttgagactttaaggagcccttctggaatgttcaaaagttagtttgtgatcaaaatgacttaattttgaattcaattttgggaagtttgtcaaaaataaaagttcaaaacgcttatcaataataggatcacaaatcactgtgaataatagtcattcatttaaccaaagtcataattgtaagattttcaaaagcagttatatcattgtagaaaaccttaactcttttagtacagacgagattaagttttcctaagtaatcaataacctaagaaggaaaatatgaggcacagggattattttgataagactcagattatttgtttcctaggccagttacctagaagttctcaccattttttactaagagcagataaatactaaagaaaaccttgttttaaaacaggaaaccaaatactagttttgcatcagtgtattgttgatatcaaagctcaatttttcaccttgtaaggagactatttttttcaaagaaaataggcaattcggagagttagtagcctacgaatattcaggcaaggtaggaaagaagggagcagtaggagtcaggtgggctttaccgtctttggtatgggtgatatcttgcattgttagctttttattagccttcacaatacatttctttaaaagcaattttagaaccctatttttttttttttacatttctatttatttatttattttttgagatggagtcttgctctgttaccctggctggagtgcaacggcgtgatctcggctcactgcaacctctgcctcctgggttcaagtgatcctcgtccctcagcctcccaagtagctgggatgacaggcctgcaccaccacacccggctaatgtttgtatttttagtagagacggggtttcaccatgttgcccaatctggtctcgaactcctaacctcaggtgatccgcccacctcagcctcccaaagtgctgagattataggcatgagccaccatacccagcctctttgacatttctaaatgtcaattagaataacaatcccattctctctgcctaattcaagaggcttgggattcaagtgcacctcttagaaaacagtttttttcatctaggatatttcatataatgaccattgtaattctgaattatctttagtaagattttgccacttttgtaattctttgcagcttctgtggccataatttttattcatgagaaagtcaggtgtaccagaaggcagagtactgacatctttagaaattagggatctcatttttatgttggatcttgggtcttagagccaagatggctttggcactgaaatctcagcacacaagaaaagaagaaataaagagcccccctgcagtaataaccacttagagcaactgacggcagttaccttaaaaactgcatctttttttgccaatgactcttcagtcactgcaaaccaaaggttatgtgccctgccatagcacaaactacctgttggtaccccaaaagccaaagagatcagagtactcaattacaaaagagagcagagcccagacctgagaggaacttacacaggattctcagggctccaggaggaagacaggggacccaccccccaccacttaaaggggaggttagcagcatcttttctgtgttcctcaaggagtctcagagacatcagtaaccttcattcaggtcccttcactggtcaccatatctgtcagaagacaaaattacaacaaatttagtttaaagatctgaattggctttatttgcagttctagaatcatgcaatacttcattccattaagtagaataagtgtcccaatgagtcaaacaaggttggttttatagacagaaaaaggccttaagaaagcagaagcaaagaacaaaaagtggatcggtcattttaaagttactttccttgtatggtgggagctgggagacacaacaatagaaaaataactgtttggttaacattaggttatttcaggttaaggattaaaacaggaaacttcgctattcattccaactgaagctcctgtttgggaagttggatattttctctctttcctgattttagaaagtcagataacaacttagttttgatttggtgatgtggaattttagcatgggtgactccatttcgatttttaatctggtttgttgtgcttagtccaaaacaatggtctcctatgatttttatgtaatagccctctagattcttggttctgccctctaagtcatgatttatttttaatgaaactactcatgtttgcagctgagtagttttatcaacctgcttcctgccaatagaatttgggggtgccaacatcatcctttcattttgtatcctctctgtccctttgattccacgttggcagtgtttttgctgaaataaaactctgtgagtcttctgtggattttatagagattcacttcattataagaaaggcatatccacagatcgtttaaaaataatcccttttccatctcatgctacaatggctgagggatgatgcttttcagttcctagaggccctctgatttgatcgacaggatctgtgaggcacacccttcatcacttgaaagggacctttgcctgactgcataaaaccagcttttgatctttctgaggttttagcaaaagtctatatagtcacaccctcaactttttctatagagcttgctttcttgacagtgaatttcttaattttagtgtcttttctatttggagagtctgaaaatttttaaaatcatgtcccctttcatttttgtataagttctcccaatgtctttctttctcctcttgcattttactgtaagtggtaagaagaaactaggtggcactttcaaaccattgcttgcaaataatgttaaccgtatagctaaggctattgcttacaggttgatcttctcaagtaactataggatacaatttccctaagttttctgccaccatcacaagggtctccattgctccaatttccagtaacatattcctcatttccctctgagccctcatcagtggtgtccttaaggtccaggggtcagttaagaactggttcaaggcattttaggccttctctatgatgctgcccagtctccttccactacccagttcccaagccacttccacattttagatatttgttacagcagcatccccttcccaggtaccaaactctgtatggtagtgtaacaaattaccacacatttagtggcttaaaacaacaaacatttgctatctcacaatttctaggggtcaggaatctgggcacaacttaactgaatcatctgctcttgatcttactgtgccaaattcacagtattaactgggttgcgtttttatctaaaggctcgagtttggggaatgatttgcttccaagctcattcaagttgttggcagagttcatttctttgcagctgcatgactaaggaccctagcatcttactgtgttcttatggctgtagccccactgaagtcccatagttccctgccatgtgatcctcttacagccatctcacaacttgactgcttatatctttaaggccgatgggagaatctctcacttcagttttctgagtttcatccattgtgacacaatcatgggagcgacatcctatcacctttgccaaatcatattgatcagaagcaagtcacaggttctatctacacccaagtgtaggagaccttagggtgcgtatcccaagatagtctagtaggttaaatagtatctcctaaagatatcataatccctggaatgcgtaaatgttaccttatttggaaaacagaatctttgcagatgtgattaaggtagggatcttgagatataaggattatcctgaatttttgagggataggggagtggacatgaaatgcaatcacgtgtatccttataagaatggggtagagggagattaagcacatgtagagaaggccgtgtgatggtggagcagagagagatttgcagatgctggccctggttaaagattgatgtgatgcacctataatcaagcaatgctggcagccaccagaagctaggggaggcaaggaacagcttctcccctagagctttcacagggagtatagcccagctgacaccttgattttgccccagtgatactgattttgttcttttggcctccagaactggaagacaatactttctgttgttttaagccacttagtttatggtaatttgttacaacagcctcagaaaattaatacagataagtagtaaatgagacctaagtggtgctttttaaatgtatttctctggttattcagtgaagctaagtatcttttcataaggttattaactattctgcaacatttccaactcatgtcttttgtctctttttcttttggacttacctgttgattagtaggagttctttacatagtgtaactactaatctttgtcagttatacatgttactgaagaagtttaccagtaaattatctttttaccttgtttatgggatattctgtattcagatatattttcaactatttttattgtgaataattttaagtacattcaaaagaagagagaatagtgtaatagaccttccatgcgctcatcacttagctcaacaattatcattatttttccccagaagtattcatttctacctttaaggtttgtactttttgtgcattatctaagaaagccttaaataaagattgtgttgctattatttgtgtggctatttctgttatgaaaaccctcattctttttttacttttatataactattatgtgtaataatttttaatatattcaaagtactactggcctcagtgttcatctctatcttcttcctgaacagcctatatttttcttattcagcccaagctattgattcagaacttgggaactctccaattgccccaacaatgtcatgcatgttaccaaagagcttgttgaaaatcccatgcatccctataaggctaattattcaggagatttcaaaatacaagtctgagtcagctagcaggcactgttgtgtttactaagtaattcctctctttccctttcttgtttctagtgtgccacctgggcttgaaggcatgaaggaacaggacctgtgcaacaagataatggctaaaattctagaaaattacaataccctgtttgaagtagagtatacagaaaatgatcatctgagatgtgaaaacctggctaggcttatcatagtaaaagaggtctattataagaactccctgcccatccttttaacaagaggcttagaaagagacatgccaaaaccacctccaaaaaccaag

SEQ ID NO: 1408 - DNA, 51629 bp, Homo sapiens
  full length sequence of bloodCirc_05428
ttgatctcccttttgtgaggtggtttttaagtgaatcattaaagagcaaaggagaagttttcccgtggctcccacgctgctattcaaaacttcctgggttagtaagccttcttgtgaattgtctttaaaatgtttattaaaaactcttaggaactctcatataaagtcttaaatttgtgtacaaagatgctctctgacattgcttgactagtgaagaaagttaaaacaatctaaatgttaaaaatatattatatgtatccagacttcagaatttttttgtagacattaagagaataagctagagctatacgttgtgacatgaaaatgcctactatatactagttaagttttttaaaaagtattttgcagagaaaatatgcacagtataatcttacagtgcaaaatttttgcaggcacatatgtatatgatatatgcaatctatatatgcatatagaagggtctgaaaatatataatagttgccactggagtggtatgtgtgtttgtgttgctttaatttttttcagtacacatttaaacagaagtaaaaaacaatttaaaagaaatttggctgggtgtggtggctcatggctgtaatctcagtactttgggaagctgagataggaagtttgcttgagcccaagggttcgagaccaacctgggcaacagagtgagacctgtctctacaaaaaacttaaaaaattagccaagtgtggtagtgtgtgccgggactgaggtgggaggatagctcgaacctgggaggtcaaggctgcagtgagctgtgattgagccactgcactccagtctgggtgacagagtgaaactctgtctcacgaataaataaataaataaataaataaatgggagaatcttaataaccttggagtatggaatagatttgtttgtttttttgtttgcgacagggctcaagtaatcccaccaccccagcctctgtagtagctaagactagaggcatgtgccaccacacatgattaatttaatttagttttgtgaggacaggatctcactatgttgcccaggctggtctcaaactcctggcctgactgatcctcctgcctcagcctcccaaagtgctgggattacagatgtgaaccgctatgcccccaccagtttttttttttttttttttgggtcttggttctacctggaattttttttttttttttttttttggtgtgtgatgtgaggcagggatcaaatttaattttattatatgtatacccaataaccatattactgttaacagagtgttttgaatttttgagttaataatttttaaaagcagctcatggtttcttgttaagcacaattgcagtctttttgtccttcaccaggctgcttcatatattcaagtttgtgatctctgtgaccagagtgatatgattggtggatgacttgatccagaaatagaacctagaagagtagatacagagtatattttgtaggtctcactcacatgtcatttctcttactatttaaatggaaattagattgcactttctttcttctctaataaacttgctttcacttaaaaaagaaattggattgcagacaatttgaggatatacattaatgaggaaacagattgctggttttttgcattgctggctacagaccttggaaactagagaagcacatggttgattgattgatatcttgttctaaaacttgagcatacttaaatgtatttggtcatccagctattatcacatatactaacgtttgagacttttaattttgactttagggtacatgtatcaatacagttgtcttaactttctaagatgtttgatataaaacactgtaaatcacttagtttaagtatgaagaccatttttgtttcctcttaagagggtttttattacacttttagtctaagaagtgttgctgctgaggccttcagatgtatattctaaatttttcttttttctttttattccttttctttctcatactggtggtcagaagaaggccttatgatttagtagaattgagcaatattgataaagattgtagatacaagtttatttttagatttcttagacttgtaaaattgagaaagataattaaccacttccttgaattttccatttgcagcattataaagcaaaacaaacaaacagacaaaacagacttgtgctctggagggtaatatgtgagatgagatagagccccgaatgattgttatttaataatgggagaaaggtgctttatcacttcaaagtagggttttgattttgcctgaaaggttaactgtacaggccacatgttttatctgaacagattttatttttgaagtagtttaaacagtgggctatgtggtattatagtacagatgatttatggaaggaagtctttacatatttgatatattttggcacaaaatatataatcctagatttttcaggatttccctgactttaatatttagaactgttgttccttgtattagcatttttatgtacagattgagcatctctaatccaaaaatctgaaatctaaaatgctcccaaacctgaaactattcgacgccacaagtggaaaattccatacctgacttccagtgacaagttgcagtcagaactttgtttcatgcacacaattacaaaacattgtataaaattaccttcaggctatgaaacaaatatattttgtgtttagacttgggttatatccccaagatattttattatgtatatacaaatattccagaatctgaaaaaattccaaatccaaaacacttctgggtactaatctttgtttcaaaaacaatagtcattattatagatcttgggaaatgaggataaccgttgtaatatggctgtaaaagagttgtagaaagacttttctcctttaaagacattgtttttgtagctttgaccactaccagtggctataatgcattgtttgtggctttattgaagtcctataagatggtgataaaagcatggactttgaagtcagatagataaagatttgaattcagggtcttccacttaagtttgtgttttgatgaattgcttgatctccgtgaacctcagtttcttcatctataaaatgggaccccacttcataaggattgttggagatgataggtgaagggtcaactactgggccttgttcaaagttgtcttcagtagtaaagtaacaattcaccttctcctacagagagataacatcatgatgtgggaagaagggaactacttacttttgtgggaggcagtgttgtataataggccatttgttgcttctctgttttgtacgttgtgtaaccttagggagattatccagaaagtttaccctcagtcttctcattggtaagtagagataatgttacctatgtaacagcagagttttaaagctaaatgagaatatttataaaagctcactttatctggcacatggtaacatggtaacttctattaataaaattttatggtaataagcaatattatgcttctgaagtaggtcacaagaagggcttttggttggagaaaccagaattgttatgaattagtccgtgtttactttgagggagtaaagactagggagtattcattgaaggaagactgtttaggaggctactattacttggctaaaatacaaataatgtgactcaatagtttctcaaaattttgtgtaatctaggcttatgtaaataaactttactgttttattaggatttaaaatcaactttattgaaatataatttaaacaatgaaatatactcattttaggggtgcagttagatgacttttgataatgtacatacccacccagataaccatcaccctaatcaaggtaatggaatttctgttatctccaaaaccttcctcgtgtccctcacagtcagtgcaccacacccctcccctcctctggttcaaggaaaccactgatttgcatacattcattttgtctcttagaatttcatgtaagtgggctgggcaaggtggctcatgcccatatttccatcactttgagaggctgaggtgggaggatctcttgagccaggagttcaaggctgcagtgggccaggatcacaccactgcagtccagcttagtgacagtgtgagacccggtctcaagaaaaaaactttgtgtgtgtaaatggaatcatactgtacatattctttaatgcctggctgctttcactccgcatgtttttgagagtcctccatgttgctttgtgttccagtagtttgttgccttttattgctgagtagtattcactgtggtatggctataccacaatttgtttcttcattcacctgatatttgggtttccagtttttggctattatgattaaagtggcaatgaacattgatgtacaagtctttttgtggacttaagtttttatttctcttgggcaaataggagtagaatagctgagtcatatggtgtatattttgcagtttcttaataagttaaacagtttttcaaactgattgtgccattttatcttcctgtaatctcatttacattatatgctgtgtttttaattttaacttttttttttttagtgtgaattgatatcttattgtggtttttatttacatttttctttttaaaagttttgttttttgttgtgagacagggtcttgtctgttgtccaggttgatgtgatcctggctcactgcagtcttgacttcccaggctcaaggaatctttccaccccagccttccaagtagctgggactacaggtgcatgccactacatccagctaattttattttgtaaaaatttttatgtagagatgagatcttgctgtgtgcccaggctggtctttaaatctggggctcaagtgatcttcccgcctcagtctcccaaagtgctgggattataggtgtcagccaccatgccttgccttatttgcatttttctgatagcaaatgatgttgaacacttcttcatgtgttcattggccatttgtatatccttttattagatgaggtgtctaattcttaattcatttttaaaaaagcttttaaaaattactgagttacaagttctttatatgttgtggatacaagtactttgtcagctgtgtgaattttgaatatacagtcagcgctccttgtctgagggttccacatccacagatttaacgaatctaagatggaaaatgtttggtaaaaaaataacaatatgcgaataaaaaataatacaaataaaaaatacagtataacagctatttatatagcatttaatcatattaggtattataaataatctagagattgatttaaagtataaggaagatgtgcatatgcaaatatgggttttttttttttttaaataagggacttgagcatcctcgaattttggtgttcagttttgggtggattaggagggtagagaggggttcttgaaaccagtccaccagggataccgagagatgactgtattcttttgttctgtggcttgcctttcattttcttaacagtctttggaagagcagatgtttcttaattttgttgagtccagtttatcactttttacttatggttagtgctttttgtgtcttaagaagtatttagctacaccaaggttgtaaagattttcacctgtgtttattttggaagccttacagttttagacattacatttaagcctatgatctatttcaagttaatttttgtgtaggatgtgaggtaaaagttcaggttctcctctcccatatgaatatccagttgttcaagcaccatttggtaaaaagactatcctttcctcatttaattactttgacctttgttgaaaatcagttgtccataaatgagtgggtctttttattattgcattgatttgtatacctatacttttttttttttttgagacagagtcttgttctgtcatccaggctggagtgcagtggcacagtcttgggtcactgcaacatccgcctcccaggttcaagtgattctcctgcctcagcctcccgagtagctgggattacaggtgtgcaccaccacgcccggctaatttttgtatttttagtagagatggggtttcaccatgttggccaggctggtctcgaactcttgacttcaggtgatccacctgcctatacctcccaaagtgctggattacatgtgtgagccactgtgcctggccctgcatatctatacttatgccagtactacacttgattactgtagctttatggtaaattttggttactctagattctttgcatttccataaattttggtattaatagtgtcagtttctatcaaaaagcctgctggaatttcagtttgtgttgtattaaatatacagatcattagggagagaattgtcgtttaaaaaatattgagtcttctggtccttgaaaatggtgtatcttattattttttaaggttctttagtttctctcagcagtgttttgtagttttcagtgtaggaagtgttggacatcttttattggatttattcctaattattttaagtgcttacatgggaatttttttaaagtttcattttttccaatttggtgctagtatgtagattacaattgattggtggtctgtctagcatgtagaaattccttaataagtagtcagatggaatttaatttgttctcatctaactttctggagaaaataatcatctaaaagaaaaaagattatctctgaatttgaatgggttttaaatttgtatgactgtggcttattttaatttctctgaatttgtaacgtagaagtacatttggattttatggtaaaatatacgatattggatataagtggagacatgtagagatcattcaacagatgagaggatatagctatagaaaagcagagttgaaaatttttagatggtaaaatattcaattttatattaaatataatattttaaagtagaaagtgcttgagtagtatgattaaaaagaggaaacttgttttcatttgaatacattttggcctacaagaatgtctgttactggcttaagtatttttgtttgtgtataccgtcagatgatttaccatttcctagccaaacctgatttgttggcccagtacaactctcttctctcttttaagctgtgtctttgatagtatttctgttcatcctgcctagaagattgtgttctcacacagttttctgttgttggttctaaaacatggtgtaaatgagaggattgtaaaatgcgccaatcagcactctgtaaaaatgcaccagtcagtgctctgtggctagctagaggtttgtaaaatggacccctcagcacactgtaaaatggaccaatcagtgctttgtaaaatggaccaatcagcaggatatgggcggggataaataagggaataaaagctgggcaccccagccatcagctgcaacccagtcaggtccccttccatgctgtggaagcttttttctttcgctcttcacaataaatcttgctgctgctcactctttgggtccgtgccacctttaagagctgtaacactcaccgtgaaggtctgcggcttcattcttgaagttagcgagaccacgagcccactggaaggaaccaactctggacacatcttggtgacccagacgggaccattggaccccttttgcttgctattctgtcctatttttccttacaattcaggggctaaacaccagggcacctgtcggccagttaaaagcaactagcgcggccaccggactaaagacacgggtgttaggctttctgggaaagggctctctaacaacccccgactcttcagagttgggagcgttggtttgcctggaaccagcttcctctttgcctgtacttctgggctgagccaagggttgacaagaggggaaagccattcagctgcggggtcccaacaaaaagttggttgaccctgtagccatgaggggaactctgtaggtcagccaaaggttcagtgggtcggtccaggggtccttggtagaagttgttagttgaactcatttggggttccatttgtaagaccatctatagcttgatggcatcgatcctggaggaaacaaatttgacaaggagtttaaaaatacgggcctgaaggcgagtaatagcaagatggctgttacgggacctagaaaggggagaagccatgttgcccagctccagaggttggtataagagtttgaaaggcgttgtctgatttcagaagccttttcctgtaaacgccaggtggcgtctcatactatccctcactggttagtgtaaaagcaacattcttcccctaagaaggtgcatagtcctcctttctcagcagtgaggaagtctaggccttggcggttttggagagtcactgctgccaaagagtctatctgggattgtagaggaaggatagattttgttatttcttgcaagctgtctgagaaatcctttgagagtgtgtggtagtaggataatgaagtagataaatctgctattccaattcctgtagcagtggccattcctaaccctataagtaggggtattagttgtatggccctgtgctgatggacttgagctttgaaggggcactgatagagtctgatttcctggggcaatgttaatgttgggacttaggaagactaaggtgtaggtgcctgtccagttggtggggaggcagatacaggttgaagttccacttaagaagaatatgccttggctgggtagacagaaatttaccctggcttttaaaggaatagggtacactgttttttctttactacttctatctctgtgtctctctttgtctcttcctctctctctctctctctctctctctctttctctctttctgacttcttttctgtctcttcctctctctgtttctctctttctgactccctctttgtctgtctcttcctctctctctctttcctctctgctggtctttccctgcctctgccagctgcttatgctgctgttctcccctctcctttcagcagtgtaagactgccacctccttgggtttttgcactgtgtgcaataactccgtgatttccttatggtatttaatggggttcacccagaggttaggaactccctttctttccatattgcatcatgggcacgaaggattagataagcatacttgttatctatacacatttattctttttccctttcccagttctaaggcttgggtaagtgccactagttctgctatctggccgctggtccctgggggaggaggcttactttcaagtactgttacatcactaactatggcataacctgccctttgtatcccattcttcacagatgaactgccatcagtgtataggttaaggtcaggattagctaaggggacttctaagagatcctcttgggtggcataagtctggactataatttgttggcagtcatgctcgattggttccccatcctctgggagaaaagtggcagggttgagagccgcacagatgcatatttgaagcatcggtccctcaaggagtagcacctggtatccaagcaggcggttgtctgatagccataaacttcctttggcacctagtgtgccatttacatcatgagtagtccagacagtgagatcctttcctagtattattttgatagcctctgatataagacggccactgctgcaactacacgtaaacagtgaggctagccttttgccactggttgtagggttgtcccgtgagtctgagtaaggacttcaagagctattcctgctctctctctgacgtataaagagaagttttgtcttgtgggaaggcttaaggctggagcttgtactagggcctgctttaaggatttgaaggctgtttctgcctctggttcccattctactagatgagtatttgccctctgggtctcctttattagagtatagagtggcctggccatcttgctgtatccagggatctgtagtcggcaaaagctggtgattccaaggaacccccgcaactgttttaatgtcttagggcgaggataagccagtataggctgtattcgtttcttgctgagggccctggttcctctggctaagattaggcctagatatttgacttgttgtaggcagagctgggcctttgatttagatgccttgtacccttgattagctagaaagttcaagagatctcgagtagcttgctggcatgaggcttccgaactggcagccaaaagtaaatcatccacaaactgaaggaccagagtgcctggacttgagaagtggcctagatcttggaccagtgcctgaccaaacaggtgagggctatccctgaacctttggggcaagactgtccacgtaagttgggacgtgtgatctgtaggatcctcaaaggcaaagagaaactgggagtcagagtgcaggggaatacagaagaaggcatccttgaggtccagaactgtgaacgattctgcttcctttggtatttgagagaacagggtatagggcttgggtacaactggatatagaggaattactgcttcattgatgagtctaagatcttgcactagtctccactgactggtttttgtactcctagaattggggtgttgcagggactgctgcattttcttactaggccttgagcttttaaatgtctaacaatatcctgtaatcctttatgagcttcaggccttaagggatattgcctttgataagaaaaagtggtgggatcttttagccttatttggagtgggtgggcatattttgcccttctgaattgtccttccaatgcccaggcttcagggttgattccctcctcaagcaggggacaacaaattggtaacttgttccccatattcatgtagataatagctccagctttggctaatatgttcctccctaataagggtatgggactttcaggcataacaagaaaggcatgtgaaaagagcaaagtctcccaattaccactgagaaggtgggagaaatacctggttacagactgtcccaggattcctcggatggtaatggaccttgaggacagctgtccgggacaggagattaacactgagcctcggatggtaacggaccttgaggacagccgtctgggacaggagattaacactgataaagctgtaccggtgtccaggaggaagtcaatttcctggccctcaatggttaaacatacccggggttcagtgagggtgatgacatgagctggcgcttgccccgggcaccctcagtcctgttggatcatctggttgggggcttctggcccagagaacctttgtcctttggggcagtgcaccttccagtgattgccttggcatagtggacatgggcgagggggcagcttgtttctcgttggacaatcttttttaaagtgtccttgcaaaccaaattgataacaagcctaaccgggtgattggcctgctccattttctgtcctctctgaaccaccaaggtctgtttgtctgagggccatgactaaggctgtagcctttctcttatctcacttttccttttcagcctgttcttctcgatccctactgtagaacacggaggttgccaggtttaataatgcgtccaaattttgttcaggggccagggctagcttttggagctttatcctgatatctgcagctgactgggtaataaacttatcttttaggatcaattgaccctcgagtgagtcgggtaacagggaagtatattttcttaaggcctcctgtagccgctcgaggaaggcggtaggattttcttcctttccctgagttatggtggatgtcattgaataattcatgggctttttcctaattctgcttagtccttctaggacacaggttaacagatgttcacgactccagtccccatgatctgagtcgaggacccggtggggatccacactgagaatggcttgctgaccagtagggaatttgtccctttcttcgactgtcattctgtcatttacgtgactgagatgccaggtatctccaaactcttgggctgcaactaaagctgcattcttttcattaaaggccagggtttgatctaacaatagcatgacatctctccaagtgaggttgaaggtttgccctagaccctataggacatctatatacctatcaggatcatctgaaaacttccccaggtctactgtcatctgctttaaatcagagagagagagaaggggacatgtacctgggttgggccaaattcccctccccctacagcttgaaggggacataaccgatagcctgggagtttttgtggtcctttggagatttctttgcttgtttccttctgggtggtggagattagaggaggcttatcattaataggaaggggagctgtaggaaggctaggatatgggggtaagctgagaggtcctcctccccaatattgcaagctttgcatagttgtggattatccttcagtgaaaagaaagcttggacataaggtatttcactccgtttgtcttccctcttacagaaaaggtcaagctgcaggatagtattgtaatttatatttccctcaggtggccatttttgaccatcagagagagaatattggggccaggccatagtgcagaaaaaaatgagccgcctctttttcagggtttgcaggtcaaattggtcccagtggcttaggatgcatttcaagggtgagcctgttgatgcctgtgtgttccccatctgaaagaaaaaacctcctgtggttttggtttgttccccgctaccctctcaaccccgagttatcgtggctttaaaaaccggaccattgtcgctttggctggcctatagaattcccctctggaggacactaccactgcagggccccttctttacccctatccagcaggaagtagctagagtgggcatcgcccaattcctagcagcagttggggtgtcctgtttagaggggggattgagaggtgaagccagctggacttctgggttgggtggggacttggagaactttgatatcttacaagaggattgtaaaatgcgccagtcagcgctctgtaaaaatgcaccagtcagtgctctgtggctagctagaggtttgtaaaatggaccagtcagcaccctgtaaaatggaccaatcagtgccctgtaaaatggaccaatcagcaggacatggagggggacaaataagggaataaaagctggccaccccagccagcagcggcaacctggtcgggtctccttccacaccgtagaagctttgttctttcgctcttcacagtaaatcttgctgctgctcactctttgggtccgtgccacctttaagagctgtaacactcaccacgaagttctgcggcttcattcttgaagtcagcgagtccatgaacccactggaaggaaccaactccgcacacataaagatgaggaaaattgttcttttggttttgacgactttactatgtgcagttagcattgctgaatgtggtggtctctgagagcagtgtaattctgatgatacatacaggcatttgtctattaaaaatgggatgaaattgaagatggtttattgccttttatatcatcttttggatttgtgataaagacaaacctttgaaaatgtttgtagttattaatatgaccagaaactgaaactgtttcagtttggcacaggagagattagtagtagtattgctgttagtcattatgtaagagatgataatgtttggatttaaccttcgattgtttgtaatatgatattcctaacattcctgactaaaaggctagtgaataaaaaataatgcatttacaactatattaaaactgcattgcagaaagcatatgaaatttcaagtttaggaaatttcctgctttgaaacttttttcttcacacttcacgctttcagcacttatgtgtgatgcatctagaagatgcatctggttttgccaaatacagtactgcacctgaattacattttcggtatttattcagtatttattttcagtctttatttcctaaaggttaattttctttaaaaccttagcaatttttcatccagcccttttcatgttataatcatttgcttgtgtgattttaccacacactgtatccaactaggtagcattactggaaaacttatttgattttttgccaaatgggagatggctggaatattttttgtagtagagaatatgtggagaaaatgctttaattgatccctgaccaaatacagcaagaaaaacttaagtaaaccttaataagcaggcaatagaagttaaggtgataatattctgactttggatataaacactcaaacatgagctctgctactggaaagtaaaaaataaaattagtgttaagttgagatgagtcaacttgttgatcatctgcctagcctactgtgataggaatggttgtaagacttggaagtttttccttcctaagttgataagcatttgagtggaaagaaagtcacttttctcttgatgttttttcactttggaattttcagactgtttaaagtcttttaaaattttctgagtcacttctttattttctaggctgctcatattaagagaagtattgcctttttatcctttaaaatgtaataccctcatctttagtggttgtccctgcttaggttatattgcttagaacataacgtttatgtttggttaaaatttcactgagccaccgggcacggaggctcacacctgtaatcccagcactttgggaggcaaggcaggtggatcacctgaggtcgggagttcgagaccagcctgatgaacatggagaaaccctgtctctgctaaaaatacaaaattagccaggcgtggtggcacatgcctgtaatcccagctacttgggaggctgaggcaggagaattgcttgaacctgggaggcggaggttgtggtgagctgagatcgtgccattgtactccaacctgggcaatgagaatgaaattccatcttaaggaaaaaaaaaaaattcagcttctgaaaagcactagggactaagcaagttgactatgtaggctttattattagatttgtgtgtttgtattataaggaaaacaaatttttagtaaaatataatgtattttgttcattgtttagttcattgctggattgctggtctctagaacttttcctggtacagaataaacatataataagtattttttaaatgatgtacttaattttattaccctaccatgcttgaaactgtgactttatattatagtttcctttagcaaaaggtgaaactatagtcaatatatagattataagtaaatttttaaaaatcttcatttaccgtaatagcatcattttacatgtatacctgcttttcagatttgtaactcatttggtttaagtttggggcatttggatgtttctgatgttgaatgataaaatgtaggcttaaaaaaattatccttcgagttttatgctgctgtattgtgtatagcctctctttcataatgatacttggactgtgatggtataaagtgactcttattttaatctgaatgcattcgagatatttcaagttcttgaaagactgttacacttcttgggatggtcatcatcatatttttgaagcagagatcctaaaacttaaaaacctcagagaaagtccagcatctattttcaactccttgttttttaaagctttagaacttgactttgtactctttggtgaggtgacaaaacaaattcagatttttttttttaactgaggacttcaaaaaatttttgtgatgtttatagtattttgtctctttttagaaagtcaaatttgttgaggtatagtttacactcagtgaaattcacccattttagatgtatggttctgtgaattttgacaaacattactgaaatggctaaagtcgactgctatctagcagacagtgctaaaatagcaacttagcagttaaaatgtcatctttttatcactttgggaagattctcattggtatctttccatgggtacaataagagaccagcagtgtggcaggctttcactgtctttttccctcaactctacctcacataaaggtgagattttcctattttcttaggaaagtcagctagtggggtagggtgataagctaggacgggttccttgtgattttatttaaaggttggtctacttaatgctgggggaaaaaagaagtgtagtgatacaacatgttgcctacctttacattttcaaaataattttaaggaaataaactgctgtttgattcgaaatgattctttgtgttatggcagttaagattttattaacaccagggctcgagaatgcctgttaaaaatctaggtgttgctccttctcagctaccaactatatctttttttaagggccatattagtaacatatgttgggaacttttgccatgttaccaattatgctttttcagttttttttttgagacttttctactcaaaaaggttctgagtatttagaaagtactccaattgtaatcattctttttattgcttctggaatgtagcagggctccatgttcttccccatttcttgacagtttcttaatatcttggaacattgttgtagagtataatgtcctatctgtgttgaaatacttggctttggcatttaagtgctatcatgcatttatttgagaacagtttatggctcattcagacattgtggataagagcattgacttaggtgtcaggcagaataaatttaatctgactctgccatttagtaactatatgaacatggataagttaattataactgctctagctgttttgtcatctgccaaatggggaaaataatcatatgtatcttccaggattgttgtaaggattaaagagataatccttgggaaatattttattgcatgtagtaaacactcagagcatgttagctgctcctgtcatcctcactcagcagaagtttttttttgttttcatcttttttttttttttggagatagtcttgctctgtccccaggctggagtgcagtggtgcagtctcagctcactgcaacctccgcctcctgggttcaagcagttctcctgcgacagcctgtggagtagctgggattacaggtatgtaccaccatgcccagctaattgttatagttttttagcagagatggggttttaccatgttggccaggctggtctcgacctcctgacctcaagtgatctgtctgccccggcctcccaaagtgttggaattacaggcttgagccaccgtgtctgtcctcttttcatcccagaccatgcttggtgttgtggatacaaagtgaattctaaagaaggcctccccatcttaagaagtttcatagttcaagaagggaagacaggcatgtaaacagataaatgcaataagttgtgacatatgctatatcagaaacaaatgaaaagaataaaggagttagtatcataagcctggggaggtcagggaaagacatttctatccctgacttatttttgatgtgtgaatagtagtttcctgttgacttatttgacagatatttactgaatacactttacttttgccaggcactattttaggtgctgggaataccactggtttcatggaagacaatttttccatggactggtgggcagggggtggaggggatggttttgggatgatccaagcacattacatttattgtgcactttatttctattattactacattgtaatatataatgaaataattatataactcaccataatgtggaatcagtgggagccctgagcttgttctttcacagctagactgtcccatatgggagtgatgggagacagtggcagatcatcaggcattagattctcataaggagcgtgcaacctagatcacaatagggttcaggcttctatgagaatctaatgccaccgctgattttacaggaggcggagctcaggtggtaatgcaagcagtggggagcagctgtaaacacagatgaagcttttgagcccctcctgctgtgaggccaggttcctaacaggctatggaattggcttgtagcctaggggttggggacccctgctgtataggagttgtgaaaggaaattaaatcttggggccctcaatccctaaactaaaggaaaaagtcaagtggggaactgcttagggctaacctgccttccattctattcaaaatcatccctctgctcactgagatagatacatatctgattgcctcccttggaaaggctaatcagaaatgcagccattggtctctcacctaactttaacctggaagctccctccctgatttgagtcttcttgcctttgctttaagttgtcctgcctttccagaccaaaccaatgtacttcttacatatattgatcggtgtctcaagtctccccgaaatgtataaaactaaactttgccccggccaccttgagcacatgttgtcaggacttcctgaggctgtgtcatgggagcgtcctcaacctaggcaaaataaaataaacttttttttttttttttttttttttttttttgaggtggagtctcactgtcatccaggctggagtgcagtggcacgatctcggctcactgcaacctccacctcccgggttcaagtgattctcttccctcagcctcctgagtagctgggattacaggcacatgccaccacacctggctaattcttgtatttttagtacagatggggtttcaccatgttggccaggctggtcttgaattcctgacctcaactgatccgcttgccttggcctgccacagtgctgggattacaggcgtgagccactgtgcccagcctgcaaaataaactttctaaattaactgagacctgtctcaaattttcagggttcacagagtaaagaagacagataatgtctctactctcaggagctttcagtctagtgggaaaagatcagtagtaaacaaaaatatcagagacaagtgctatgaaagagactaaaaggtgatgtaataaggagagactgaggggttgctttacattgcattgtcagggaaggatcctttgagtaggtaacctttgagatcttcctacaaaagagtcagccatggcaaagattagagggatgagcattctaccatagggaaccatgttacacaaagccccttgagctcttggagtatttaaggagcagacaggtcagtgtggctggaatgtaatgggcaaggggtagagtggtgcaaaatgagatcagagatagtcagggtctaaatcatttaaggctttgtaagccagagtaaggagtttctaggtgtaaacgaaagccagtggagggctgtagcagggggaacgccttttgaaaaagattactgtcgctgccgtgtgaagactggattctgaggataagggtaacaagggtggaatttaggagacctctggaggctgctgtattagtataggtgagaggtggtggtggcttgggccagagagtaaattagtggagaaaaataggttgatttgggctgtgttttgaagattgaatcaacaggacttgctgactgcatgtgatcaaggcaaatcctaggacttgagcacttagaagattggtggtgcagtttactgaaatggataagactggaggggagagcaagtttggtgggacaatcatgagttctgttttgttaagtttgaggtgccaattagacatctatgtagagatttcatacttggtggtaggtaatagtagtactgtggaattcagtgagagtttagggccagggataaatatttaggagtaactgatgtatgtctgctagatttggtaagtgaccttgacaagtgtggtcttagtgggaatggaaactagattgtagagaagtatcaggtaaaggatggaatgagaatatgaagttggggaatggagacagtgacaatagactcctaagaaattttcctgtgaaaagggaagcagaaaaatggttgtgaccacaagtaaggcccagattcgaatcttacttttatacttgcctggatacagttattatttgagtgcattctaaagtttaagatattttatgtaccctacgcagtcctctctacaaatattgaggtagatgatacttttccttctgtgacatgagagtccttagtttagggaagttaagtgacagtccaggtagaacctgtatttggactcactcactttgactgtagatgcagagtatttttcattataccaaaatgctccttaaacttttattatcttggtcaaatccaatctaccttagagtttttggaaggattacaagatgagagatgtgaaaattctttgcaagctctaaattgttacacaaatatagaaattcctttctttaaaatgccccattatgtcttctttgtgcatgactttttaggatatagtaggtagtggccttgaagttcattttggatcatagcctatctcattagagcccagagaatgtaagcagattgttaaagacatagaacctgtcaaagctatctatggcatatgaatcgaacatggatcatgtttaattgaacatttttaccctggtttaatgatcttgtctccttcgcatgttccatgaggtctcataatcctccccaaaggagctcttcccaaaaataattccttctaaaaatgtggaagggctgggcacagtggctcatgcctgtaatcccagcactttgggatgctgaggcaggtggatcacctgaggtcaggaattggagcctggccaacatagtgaaaccccgtctctactgaaaaaaaaaaaaaaaaaaaaaaaattagccaggcgtggtggtgggtgcctgtgcctgtactcccagttactcaggagactgtcggaagaattgcttgaagcgagaggtggaggttgcagtgagccaagatcgtgtcactgcattccagtctgggtgacagagcaagactccatctcaaaaacaaaacaaaacaaaacaaaacaacaacaacaaaagtggaagtaattttaaaaaaactgcaaaaaagccaatcctgaaaggttacaaactatatcattccaaaagccgtggaaaacagtaacgtgagtcctcaaagaattaaaaatagaattaccctgtgatccagcaattctacttctgggtatatactcaaaagaactgaaagcagcagggtcttgaaggggtatttctacacccatgctcatagcagcattattgacaaatgctggaagtagtccagctgtccccaaatggaggaacagataagcaaaatgttactggtatacatacaaaatggaatctttttttttttttgggagacagagtcttgcactgttgcccgggctgaagtgcaatggtgtgatcttggctcaccgcaacctctgcctcccgggttcaagcgattctcctgcctcagcctccctagtggctgggattacaggtgcccgccacgacgcccagctaattttttgtatttttagtagagacggggtttcactgtgttggccaggctggtcttgaactcctgacctcgtgatccacctgccttggcctcccaaagtgctgggattacagatgtgagccaccgcacccggccacaaagtggaatcttatttcacctttcaaaggagagaaattctgacatgctacaacctggatgaatcttgagaacaatacactaagtgaaactggccagtgaaaccagtcacaaaaagacaaatactgtatgattccactttaatgaggtacttagagtagtacaaatcacagagacagaaagaatggtaattgccaggggttgaggagaagagggaatggagagttactgtttaacgggtatagtttcagttttgcaagttgtagagttctagagctagatggttgtaagggtcacacaacaatataaatgtactcagtaacattaactgtgcacttaaagataatttagatggtaaattttatgttatgtgtattttactatgccatcatgcctggctaatttttttgttttgttttgattttctggtgacagggtctcactctgtcgcccaggctggaatgcggtggcacgatcacggctcactgtagcctcgacttcctggactcaagtgatcctcccatcacagcctcccaagtagctgggactacaggtgtacgccaccactcctggctaatttttactaactcactcccttttctgcctcctttcagtattcattcattcatttaacagataatgactgaacaactgttaggtattattaggtattatatattattcctgggagcagactattaagagtcactctataccatcacagtcccaagtgtcattatgaaagaggggctatacacaatacagcagtataaaactgtaaacagattttttaagcctacattttatcagtcaacatcagaaacatccaaataccgcaaactttctttttttttttttttgagacagtttcactcttgtcacccaggctggagtgcaatggcgcgatcttggctcactgcagcctccgcctcctgggttcaagtgattctcctgcctcagtctcccgagtagttgggattataggcatgcgccaccatgcctggttaatttttgtatagtagagacggggtttcactatatgttggccaggctggtcttgaactactgcccccaggtgatccacccgtcttggcctcccaaagtgctgggattacaggtgtgaaccaccacacctggccaaatgtcccaaacttaaaccaaatggactataaatcaattccctgaaaaactggtatacatgtaaaatgatgctattacattacagtaaatgatctttaaaaatttatttatagtctatatgttgactacagttttaccttttgctaaaggaaactataaagtcgcagtttcaagtatggtagggtaataaaactaagtacatcatttaaaaatacttattaaatgtttatctttgccaggcaatgttctagagaccagcagtccagcaatgaactaaacaaaatgaacaaaatacattatattttactaaaaatttgttttccatataatacaaatacacaaattaataataaagcctacgttaatgcattgtactaatctgtcttggtgagaagttcaatttatgaagatacagtagaaatgattttaatttcttttttttcccctagagaatgtgatgtttattcattaatttattcattcactcaagaaatcttcattgaatgtctactgtgtatcagttgcagtttgggattcagcagtgaacaaaacataaatgcttgcccttatggaacctacaatctgttggttttaaaaaaaatctctcctggattagtgttagatttctagaccagaagtgtcaattaagtttaacaatttcttcaggcagagaaaattgcttttgaggtatcacttaagcaaccttagtgcttctaagcaacataactgccttttgaggtatgaactgaagggaagtgaagtataagcaatagagttgggattttttttttcttgagacggagtttcattcttgtcacccaggctggagtgcaatggcaccatcttggctcactgcaacctctgcttcctgggttcaggggattctcctgcctcaccctcctgagtagctgggattacaggtgcatgccaccacagccagctaatttttgtatttttagtagagacggggtttcaccatcttggccaggctagtctcgaactcctgccctcaggttatctgcctgtgttggcctcccaaagtgctgggattacaggtgtgaaccaccacccctggctgagttgggattttttaattttccatagatttcccattaggaaggcaacctggtgtgacggtatttgagagtcaagagatctgggttctaatcctcatttcatcatgtaatactttgtgtgtttcagaattcttcacagtgatccttgcttgtcctcactcctttgtacagcttttttttttaaaggattttatccactgttgtgccagtaactatgctagtgtcactttttatgctagtaatagttctattttcaagttcattctgtttcctgagtttaaatttgtgtttcctagtgccaactgaacatttctgtcatttcatactccatttccaaaaagaaactcattattgttccgctttgaatttgcttcccttctttatgatcttttcatctcggcaaatagcattgctatgtacccagctgcctaaggaaaaaccctgagtcgtcatctttctatatttcattgaccctcattcagtcattcaaatattgcttctcttgagtatatcttgaatctatcctttatgctctaatttctgaacagaactgacactctttgtcctgcatgttctactttctttgcacagaataccttctctttagttggcaaactccaactcattggttaatgtccagctcaaatgttaactcctgtaaaaccttcaccatttcttttaggcagaattagtgattcctgagtctttgctcttagagcttgtaggtcaagtgtgtactgtatttctgttctttcacagttttttattcgattgtctgtagaatagactttattattgtcaaggggaagacagccttagcaaaattttgaaataagtcattgtgtgcctaagcataaattagtttgtgagaacatactttttaaagagaaatgtagtagggtgtatagtatgtttgagtatctttttccaataagcattgcatgtataatcattcactcattgcatgtataattattatttaaatattctttattaattaaagacctctctggtctctccagaagtcttccatggctgccctcatccccaccctccagaggaatctgaagccacatgtgctccctggcacccacagcccctgcctctcccagagcagcagtacctgagcctcagtggattccaagaatcgaaacccttggtctgctgcccctccctcccagaatgtttctgtctcattcttacctactcaaggccctttcagtagccccttggggtattctcttcctatgcaccagggcaacttctgaactcaccactttcctggaaagacccccaacatcttcggggagcggtcccctacaggcctggctgcagatgcccgtgcacacaggaacactgtttaaaaaaaaaaaaaaaggatactggtgggaggggctttgtaactgaggaggtttaggaattgaaaactcatgtgtattttctttctttcctcattgtcacttcccagctacccagagatattgaaggacagctgagctcccctacttgctgaaaatgcattgatcaaatttgtgtaggatttccacatctatttatgggctcagaacactttctagttacttgttccttcctatcagctgttttctgtttgtgttagattttttttttttctgagatgaagtctcgctcttgtcccccaggctggagtgcagtggcgcgatctcagctcactgcaacttccgcctcccggtttcaagtgattctcctgcctcagcctcccaagcagctgggattgcaggcacctgccaccacgcccggctaatttttgtatttttagtagagatggggtttcaccatgttgatcaggctggtctcgaactcctgacctcaaatccgcccacctcagcctttcaaagtgctgggattacaggcatgaacaccacacctggcctcatgcagagctttaaaaaaaaatgttaacacggctgggcgcagtggctcacgcctgtgatcccagcactttgagaggccgaggtgggtggatcacttgaggtcaggagttccagaccagcctggccaatatggtgaaaccccgtctctactaaagatacaaaaaattagccgggcgtggtggtgggcgcctgtaatcccagctactccggaggctgaagcaggagaattgcttgaacctgggaggcggaggttacagtgagccaagatggcgccattgcactctaggctgggcgacagggcaagactccgtcttaaaaaaaacaaaaataaataaataaataaaagaaagctctgcatgatacaatacagtattcatagaattttggccagtgaaaattttctgtgttagtagaataaaaatgaactcttctgatttacagatattgatagtctggtctttccatcttccatcttgactctcttttactgttaaaaaatcttagaacaaagtaaagccagttccaaatacttttcctagttctggactgtttttttttttttttttttttttaacaagacagtcatttgtccgagtacaacagaacagttcattgttaatactttggttctgtgtgctttaaatcttttttccccctctacccataatctccctttgtaaactttgaatgttttgtcagtagatcatcatcataggtaaagatactgcacatcaagactgttggtcttccccattcttcctggaatatactggaagctgtcaggactgaggttaatttctccattcctagaactatattgtaataaatattggaatactggcttttgtgtatttttttgtgttacttagtttttggagaaaggaaatatttctagactttcttgacttgtcataactttttattgttaaagaatatagtttaaaaattattaaatattagggagccttctgcttcattgggactttaaggaatgatagccataggaagggatatatcttatattatcataaagcttttaaaaaataatatatttattacaattttttaaatttattttttatttttagaaacagggtcttactctattgcccaggctggtctcaaacttctgggctcaagtgattctcctgcattgacctcccaaagtgttgggattacaggcatgagccaatgagctcagccagttgttttttttttttttttttttttttgagtgtttttttttgataacttctaattattttcttatcctatccctaatagttggcatcagttaatgaactagttttgattccccaaaagccctctcttaatctcctgtattttgctttactttctatctcttttgtttatttcttagagaaatgtcatttatgtaatcagttcttattttgtaatactgggccgtaagaaagcagggaaaagcacaaaacttggcacatagtaaattttgttgcttgaacaaattaatgaatgaatgaacttgcagcataagagtgcaccctatttagtggtactgtttaattatttcatgatccttagccaagaacgaaggcataccggaagggaacacacaacaaaaaaaggtgagggaaaagtgttaatatatcatttaagtgactgtattacaacaatattacattatgttgtcactcctgaacatgagatgtgattctcatttacatttcaagctaatttggttagctgggggaattcttaggcatctcaagagataattagatataccccttaggacctcacataattataatcactattaggggtattaaagtttttttttttttttaaacaaaaacttagggggaaaagttgtgattggtaagcgtttttttctcttagtgttctcagaatcttaggagatacgttatttgaaacagttgttcaggccgggcgcggtggctcacacctgtaatctcagcactttgggaggccaaggcgagtggatcatgaggtcaggagatcgagaccatcctgactaacacggtgaaacctcgtctctactaaaaatacaaaaaattagctgggcgcggtggcgggcgcctgtagtcccagctacacgggaagctgaggcaggagaatggtgtgaacccaggaggcggagcttgcagtgagccgagatagtgctactgcactccagcctgggtgacagagcaagactctgtctcaaaaaaaaaaaacaaaaaaaaccaaacaacacttgttcaatcaattctactttagtagaaaccagctctctatattgttctctaacattttgttatcttggcttttagatgaaatctttagcatcagttgggctcattagcacctctactaagagaagcaagcacagaatggaagggagagcaaatcataactttttaaaaagttatttctccttagttaaaagtttggaagagaagcaagttgaaactgtaggctgattatgtaaaagtttaagttatcagctctcttatatgtaatgcaggttgattataagtttctgggctgttgtgacaacaagaaaattatgtttattattaaaaacttgtttatactgcatatatgtgaagggcattatactgtgacaaagctaacaataaaacatacattttaatatttcagattccttattttatttgtttgtttagagacagggtcttaatgttgcccaggctggagtgcagtgatgcgatcatggcttactgaagcctcaaactcctgggctcaagcgatcctcctccctcactctcccaagtagctgggactacaggcatgtgacactgcgtggctgatgttttgtagaggcggcatcttattatgttgtctaggctggtctcgaactttctcccgcttcagcctcccaaagttctgggagccactgtgctgggccagattcctttttttaaattgtgggaaaatacacgtaacataaaatttactatattaaccattttaaagggtgcagttcagtggcattaggtatattcacaatgttgtacaatcatcacactacctagttccagaactactttatgatcccaatcagaaactatgcgcattatacaataactcctcattgttctcttctcccagttcctggtaagttctattacactttctgacgctatcagtttgcctgttctaagtatcatataaatggaatcatatagcatttgtctttttgtgtctggtttatttcacatagcgtacatgttatagcatatatcaaaattttattccttttggccgggttcggtggctcatccctgtaatcccagccctttaggaggccgagctgggcagatcacctgaggtcaggagtttgagaccagcctggccaacatggtgaaaccctgtctttactaaaaatacaaaaattagccgggcgtggtggctggcgtgtgcttgtaatcccagctacttgagaggctgaggcaggagaatcgcgggaacccgcggggcagaggttgcagtgagccgagatcgtgcagctgcactctagcctgcatgatagagtgagacttggtctgaaaacaaaaacaaaaacaaaaaacaccaagtttatttaaaaaaaaaaaaagcttagactttttttgagcatttttatgttatagaaaaattgagtgaaaactagagttcccatatatctacccgctgcttggtaccaccagtttcccgttactaacatcttgcattagtgtggtacatttgttacagtttatgaactgatgttaatacatttttaattaaattgcatagttttgcattagggttcactctgtgtgttgtacattctgtgggttttgacacatgtatgaaaggtatccactattacagttatcacagaatagtttcactgccctaaatactcagtgtttcatctactcatccctaaatccctgccaaccactgatctttttactgtctccttagttttgtcttttccaaaatgtcatataattggagtcatataatatgtaatcttttcagattgatttctttccattggcaatatacacttaaggttctccatggcttttcatggcttcatagctcatttctttttattgctgaatagtacactgttgtatggatgtgtaccacagtttgtttattcattgacctattaaagactatcttggttacttcccagttttggcagttatgaataaagctactataaacacttgtatgcaagtttttgtgtgcacataggtttttaactcatttgggtaaattgtatgcctttctaacttttgtatttatgcatacacttttatatagttgtaaaacttagttttatctagttgtaataattttgttttatgttttaagataacataaacaatcttcatgctgtttttgaatgctccctaatattaaaatgagaaaatgaatttattatgtactttatttttctgttactcattaattgcttccattttcccctgccttaataaatacttttgtgtgtgtagtttttcccttttgtattgctttaggataaaattcaaggagaaacagtaaagagtacaattattgggatcaaggccattttagataattcttgatatgcagtaaagtttcacaatgggaaaccttgttagatttacagtggaggtttgctgcagtttattttgtggctttctagacaagagtagcaccagttatctgtgtaattttacttagaaaaaaacaaagaacttttcactggttctttgaagtggtagtaagcttccctactgttggttttgttcaaaaatcactgtttgctatctgaatcttcttgattacttcagaactttatgtaatagtttattgaggttcttaggtacaggtagctaacacgggcttgactttatcttactatggtacaatctaaatatatatttagtgttgttaattaaggttatcattcacagatgctcccttatatataggtggagaaactgaggcttcccttgagacagcatgctcctggatataaccgtgagagcagttaaactcttgagacctgcattctttatttttcttaattatcagtacaattattggatcagagtttcttctatcttttttgtgagtcattaaattccatttttaaaaggtatcttttgaatacatacatttacaggtttggaaaatatatttctagttaaaccatgtgttcttatttatttatttattttttattctaagttttagggtacatgtgcacaacatgcaggtttgttacatatgtgtacatgtgccatgttggtgtgctgcatctattaactaatcatttaacgttaggtatatctcttaatgctatccctcccccctccctcaaccccacaacaggccctggtgtgtgatgttccccttcctgtgtccatgtgttctcattgttcaattcccacctatgagtgagaacatgtggtgtttggttttttgtccttggcgatagtttgctgagaatgatgatttccagcttcatccatgtccctacaaaggacatgaacacatccttttttatggctgcatagtattccatggtgtatatgtgccacattttcttaattcagtctgtcattgttggacatttgggttggttccaagtctttgctattatgaatagagtgccgcaataaacatacgtttgcgtgtgtctttatagcagcatgttctctaatcctttgggtatatacccagtaatgggatggctgggtcaaatggtatttctagttctagatccttgaggaatcgccacactgacttccacaatggttgaactagtttacagtccccccaacagtgtaaaagtgttcctatttctccacattctctccagtacctgttgtttcctgactttttaatgattgccattctaactggtgtgagatggtatctcattgtggttttgatttgcatttctctgatggccagtgatgatgagcattttttcatgtgtcttttggctgcataaatgtcttcttttgagaagtgtctgttcatatcctttgcccactttttgatggggtcgtttgtttttttcttgtaaatttgtttgagttcattgtagattctggatattagccctttgtcagatgagtagattgcaaaagttttctctcattctgtaggttgcctgttcactctgatggtagtttcttttgctgtgcagaagctctttagtttaattagatcccatttgtcaattttggccattgcttttggtgttttagacatgaagtccttgcccatgcctatgtcctgaatggtattacctaggttttcttctagggtttttaggtttttaggtgtaacatttaagtctttaatccatcttgaattaatttttgtataaggtgtaaggaagggatccagtttcagctttctacatatggctagccagttttcccagcaccatttattacatagggaatcctttccccatttcttgtttttgtcaggtttgtcaaagatcagatagttgtagatatgcggcactatttctgagggctctgttctggtctatatctctgttttggtaccagtaccatgctgttttggttactgtagccttgtagtacagtttgaagtcaggtagcgtgatgcctccagctttgttcttttggcttaggattgacttggcaatgtgggctcttttttgcttccatatgaactttaaagtagttttttcgaattctgtgaagaaagtcattggtagcttgatggggatggcattgaatctataaattaccttgggcagtacggccattttcacgatactgattcttcctacccatgagcatggaatgttcttccatttgtttgtgtcctcttttacttcattgagcagcggtttgtagttctccttgaagaggtccttcacgtcccttgtaagttggattcctaggtattttattctctttgaagcaattgtgaatgggagttcactcatgatttggctctctgtttgtctgttattggtttataagaatgcttgtgatttttgcacgttgattttgtatcctgagactttgctgaagttgcctatcagcttaaggagattttgggctgagacaatggggttttctagatatacaatcatgtcatctgcaaacagggacagtttgacttcttcttttcctaattgaataccctttatttccttctcctgcctaattgccctggccagaacttccaacactatgttgaataggagtggtgagagagggcatccctgtcttatgccagttttcaaaggcaatgcttccagtttttgcccattcagtatgatattggctgtgggtttgtcataaatagctcttattattttgacatacgtcccatcaatacctaatttattgagagttttagcatgaagcattgttgaattttgtcgaaggccttttctgcatctattgagataatcatatggtttttgttgttggttctgtttgtatgctggattacgtttattgatttgcgtatgttgaaccagccttgcatcccagggatgaagcccacttgatcatggtggataagctttttgatgtgctgctggattcggtttgccagtattttattgaggatctttgcatcgatgttcatcagggatattggtctaaaattctcttttttgttttgtctctgccaggctttggtatcaggatgatgctggcctcataaaatgagttagggaggattccctctttttctattgattggaatagtttcagaaggaatggtaccagctcctccttgtacctctggtagaattcggctgtgaatccatctggtcctggactttttttggttggtaagctattaattattgcctcaatttcagagcctgttattggtttattcagagattcaacttcttcctggtttagtcttgggagggtgtatgtgtcgaggaatttatccatttctcctagattttctaatttatttgcgtagaggtgtttatagtattctctgatggtactttgtatttctgtgggattggtggtatcaccacccctgtatcacaatcccctgtatcattttttattgtgtctatttgattcttctctcttttcttctttattagtcttgctagtggtctatcaattttgttgatcttttcagaaaaccagctcctggattcattaattttttgaagggtttttttgtgtctctatccccttcagttctgctctgatcttagttatttcttgttttctgctagcttttgaatgtgtttgctcttgcttctctagttcttttaattgtgatgttagggtgtcgattttagatctttcctgctttctcttgtgggcatttagtgctataaatttccctctacacactgccttgaatgtgtcccagagaatctggtatgttgtgtctttgttctcattggtttcaaaaaacatctttatttctgccttcatttcgttatgtacccagtagtcattcaggaggaggttgttcagtttccatatagtttgtttttgattcagaaaatttggtcagaattagtgtctacacaatgggcctgttttcatgtccaccaggcattatggctgagtgaaaagccagaagggcccgattttgaacttttcttccacttaccagccatgagactgagcaacctgcacaaactgtgagccttgaattcttcagttgcagaaatgaggtgttgaatccttcaggttgttatgaagaataaatgagataatgggcacctgacagcatatatttatgttaggaatatataattattgctgtttgaaattgtagcctgtatatatttgcagagtgcccaaatacttgttcctcagatacagagtttatgtacatctcaatgtaccttttatagttgaagttgttttgttttgagagaagactgaagttatttgtggggttttttgttgttgttttttttcttacagtattgtcatgtggaaaatacatgttaattatcagggtttaggttttctgctgagtgtgtttcaaattaagtcatttccctctagaattggtagtttgttgtcttcatgttatttataatcatttccaagtttaccagatagaaaaacccttaatgaaattttggaaaagaagtacaccagtgagttgtttgctaatcttcctgtagttgtcacacagactgactgtttatatattttttggagacagagtctcactctgtcacccaggctggagtgccgtggtgtgatcttggctcactgtgacctctacctcctgggttcgagcaattcttgtgccccagcctcacgcttgggtaattttttgtatttttagtagagatggggtttcaccatgttggccaggctggtcttgaactcctgacctcaagtgatctgcccatcttggcttcccaaagtgctaggattacaggcggagccactgcgcctggcccagactgaccctttacagcatcactcctgttccttgcatattcatgcttccaatttaagattttgtccattacttattacagttgccatgtatgaaggtccctttttttgataattggttcttttctcttctacatactaaggcaggggtgggaataaatgtcacagcattaccactacttgatttgattttaatgtgttactctcttgtactcctaccttattagttttagtagtttatggctgggtgtggtagctcttgcctgtagtcccagtactttgggaggctgagatggatggattgcttgagcccaggagtttgagaccggcctgggcaacatgaagaaaccctgtctctacaaaaaaaaaaaaaaaaaaaaagttaaccaggcatggtggtatgtgcctgtggtcccagctacccgggaaactgaggtgggaggatcacttgaatctgggaaattgaggctgcagtatgagctgtgattgcactactgtgcccagcttgggtgacagagtgagaccttgtctcaaaaaaaatttttagtagtttctgtgttttgtttgtaaatttaactctgtattgagccagaaaagcacaagccctgtaatttctcattttagagaaaaacattcatttttttccttccccaaggagtttctccttcttcctatttttttctttaaagagagtttggcagaattccagagcctaaaataataaaataaaggtaattaaatgaattctccagccagcagagaccatcttatcttgaattgctagtggtttatgctggtccccctttgaccttctttcactttttggaggtggatgaacttttccactcaaaactatcttgtcagcctcacacatatttattaaaggagtgagtatgcttaagagacagattttttgtgttggttgaagaaaccattttggatatttttctctgttgtgactgggactgaatttttagattgatttatatttcctttgaagaacaaaggaatatttttctcgaaaatgagaattaacaggagcattaataacaacaaaaagtctgttaaacgtatttggggagattatttgttttcaaagaataacatttcttgtgtgagtcattatattcagcaaaatttcttttgtgataattttatgctgccataaaattttttgggaaaataactttaaaaaaacttcaaaaaattttattttagaggggcagtagtacagttggaagaggaattttaagtcaaagaacagtaaaacatgaattctttcagaagacagttgaaaatttactgtgcatcaggaacattacttagctctgaacataaaaaatgatgaaggtactgctctctgcctttatgtctttgcgtgtagtctaatgggagacacaagtaaataagaaacaatgggtcaaggtcattatagtagtagttacacaggtaggtgcatatgcttctagtctagccagtgggatgctgtgtaaattgtagctatgtggagaagccttgagatttccctctctgaaagtaaaattattgccttagggcagggttagcaaactatagctagcccctgggtatctacctgtttttgtatggctcatgagcaaagattggtgtttacatttaaaaatagtttaaacaaaataatgttttgtgatagatgaatgaaaattatatgaaatggaaatctcagtgttaataaagttttattggaacacagccacattaattcatttacatattgtctgactacttttgtgctgcactagctgagttgagttttttgtaggagagaccttttgtggcccacgaaacctaaaatatttataatctggccttttattatagaaaaagtttgttgagccttctttagagtgttatgagcactgactttttatgacctcaatcacacatgcagtttccttaaattccttattatatgtttaaaagttaaattagctgggcgcagtggctcacgccagtaatcccagcactttgggaggctgaggtgggtagatcacctgtggtcaggagttcgagaccagcctggccaacatggtgaaaccccgtctctactaaaaatacaaaaaattaaccgggcgtggtggcacatgcctgtaatcctagctactcagaaggctgaggcaggagaattgcttgaacccgggaggcagaggttgcagtgaactgagattgcatcgttgtactccagcctgggcgacaagagcgaggctccatctcaaaaaaaaaaagaagttaaattttaagtggctgtataaaggattatgatgatgcctaccttgaatggtaaacttttagatgtaacttttcagttatttctgctgaaaaatgctaaagtgatgtgctattctattgaaagccaagtgtattgatttgctaggcctgccataaagtactgcagactgggtggcttaaatgacagaaatgtattttctcacagttctggaggctagagtttcaagatcaacatgtcagcaggtttggtttctcctatcacccctctccttggcttgcaattgttgccttctctctgtcctcacagggcctttcctctgggcatgtattcctccctggtgtctcttcttacaaggacatcagtcatagtggattaggcccccccaccttgtaacttcatttaaccttgattacctctctaaagcctctatttccaaatacagtctcattgtaaagtactgggggttaggacttaacatatgaattttgagaggctacaatcagtgcacaccgccagggaatttctgatagaaacttcatttgtttacacattaagcagatcttgagggtgtgtactgtgtgacagatcctgttttacgtatgtatgtgtgtgtactatgtgacagatcctgttttagatacatatggtgaacgagacaaacaagatttgacacttaagaggctggtggtttagttgagaaagacagataattaataggaaaataaatatttgagagagtgataaggactgtgaaggaaattaaactgtgtcaagtgttagaatgattagtgtgacgggtcgtcaggtaggggcttcctgaaaaggtgaccttttacctgggagcttaaatggtaagggatagctagctagttaagttcccaggcatgtttctagggcctgatgttgatcaagattggtatggaaaaggttcaaaagaatagtgagtcaattagggagctttataagttgaggttggagaggttggtggggcaaaatcattaagggccttgtgggaattatggtaaagatttggcttccttttgcacaaggaataaaatctggagggattttagcaggggagtgacatgatttttctgttcgaaagagcactttggctgctaaataaagagaggaaactgcaggtatgagagtagaggatagggaggcctgttaggggattatcaaagtattgtaggtcagagatattggtggtttagctaagatcatggcagggaagagaaaaagaaagggaaataatttgagagatattttgggagataaaatccatgtattatttactaatggattaagtatgggggcttaggaagagggaggaatatctttggcaatagtgttgtgtaatactgtccactgtagcaagtgaacctatagtgttagcaaatcagatagatgattgctgcagcagcaagttacagaatataatttggaaaggaaaaaagccttcaatcattaaataggaaaacagaaggcaggtaaacaatgctatggtttaattatgttcaacttacaggcttataactactagacaaccaatggggaattcatagtttgccatagagaatgcctttgggacacataacctgtttggaatgaaaaagccctggagagtattgtaaaataacaaatgtcaggtttgatggaatgactatgcatgcaattaagtgattttctttagtgctagagttcttttttcttaggtaaatcattttaaaaaatggaccagactttgtgaaagtagatatgttacataaaataatgttagctaaagatgaatggaataggttaagagtgtcttcttgaaaatttgaactatatctctttcaaaaagaattttattacctctaggctggacttgactgaaaagttaaaaaaaaaaaaagacaaaatcttatgattgttgaactcccaatgaggagtcagagaattgtgagagccagggtctgttttttgtcacttttctctctctctttttttaagatagcatcttgctatctgcaggctgaagtgcagtggtgcgatcacagctgcttgcagctttgaactcttaagctcaagcgatcctcccacctcagtgtcctgagtagttgggactgcaggtgcacaccaccacgcctggcttatttttgcattttttgtagagacggagtcttgccgtgttgcccaggctggtcttgaactcctgggctcaagccatctgcccacctgggcctcccaaagtgctgggattacaggcgtgagccactgtgcccagctgccacttttttctatgtttagaaatctacctctgagccttattccccatccataaggcaggtaaccactagatggctaattttgaaagagcgagagcattcagagatgcacagtaattctaagttctgagtagaatacagtcatcctttggtatccatgggggattggttccaggacctcccatggataccaaaatctgtggatgctcaagttcctgatagagaatggcatagcgtttgcatataacctaagcacatcttcctgtatattgtaaatcatgtctagattacttgtagtaccaaatacaatgtaaatgccctgtaaatagttactatactgtattgtttagggaaaaaagtctacatgttcagaatagatgtaattttaaaaatctggataatttccatctgttgttggttgaatccacagatgcagaaccccattgatatagagggctgactgaatacaaaagcaaggcaagtgtgatagcagccttcttttactttaggattcaggatttacttctttacttcaggatcaaatatttttacttttcgattttatttttttgtttgtgaagagttgggagttgctgggtttagttatgctactctctttttaagggagaatatagcagtcctagagggatttgcaaactatagctcttggggaaacattcaaaattttccttgtgtaagaaattttatgagtctcgagggccggatgtggttgctcatgcctgtagtcccagcattttgagaggccaaggctggaggatctcttgaggtcaggggtttgagactggcctggccagcatggtgaaaccccatctctaccaaaaaaaaaaaaaaaaacaaagcagtgagccaagattgtgccactgcactccagcctgggtaacagagcgagacgctgtctaaaaaaaaaaaaaaaaaaagaaattctatgagtcttaaattacatcaagtaactttggaggcaatagtttaaattctctaaaatactgggcacattagctcatgcctgtaagcactttgggaggctgagatgggaggatcacttgaggccagtagttcaaaaccagcctgggcaacagagtgagactccagtgctacaaaaaattaaaaattagctgggtgtggtgggcacacgcctgtagtctaagcttctctggatggaggctgaggcgggaggattgcttgggcacagaaattcaaggttacagtgagctgtgattgtgccactgcactccagagtgagaccctatctctaaaaatattaaattaaaaaaaacccatacaactcaaatttccaggtactgttattaatatgagttatcttgaactgttgaaaaattaatcacttattgttgatttctatctgcatattaaagatctggcttaagagtcttgcatttgatgaataggcttttctatgttatatacaagaaaaaggagataaaataatttaacttttttattacattaaaaaacaggactctgggaattgtcactttatgatcagccttatattttttccagactgtgtcattgtgtatgcctgtgccacccaacggatgagaccactgatcatgtttagctcaaatttatgttggatagaggttataggatggtccttatctgaatgcagaaaggaatgtttattttgctgttatgttttatatgggataaaatgcttgaaaagtcttttttttttctgtatttttttttttgagacggagtcttgctgtgtcgcccaggctggagtgcagtggtacgatcttagctcactgcaagctctgcctcccaggttcatgccattctcctgtcagcctcccgagtagctgggactacaggcagccgccaccacacctggctgattttttgtatttttagtagagacagggtttcaccacgttagccagaatggtcttgatctcctgacattgtgatctgcccgtctcggcctcccaaagtgctgggattgcaggtgtgagccaccacgtccagctttttttgttgttgttgttttctgagacagagtctttggctctgtcaccctggctggttagtagttggaactataggcgcgtaccgccatgaccggctaatttttgtatttttttgtagagatggggtttcaccatgttgaccaggctgatcttgaactcctgacctcaagtgatccacctgccttggcctcccaaagtgctgggattacaggtgtgagccaccacatctgacctacttgaaaattcttaaatggtgccttatactttctggtaataaaagcactattttaatgttcggaactattttcattatttgctaaccttacaattaaaaaatccttttatatttatctttggatagatatgaggggacctcaaaaagtttgtggaaaaatggaattaaaagataaaaatacaaaatataaactttattctcaatataagctctatcgagttcaagaaaattttgtaagcaataatgctagccatttagtccactcctaaagaagtcctgtaaccatatcagtatgtgcagtcttttttttgcattattaattaaagaaaaatgggtgccctttaaatttttttttaaggttcggaaacaaaaagaagtcagaaggagccaatcagcactgtttggtggatgcccagtgatttcccattgaaaccctagcaaaactgcccatttgagaggaatgagcaggaaccttgtggtggtgaaagtcaacaagattccttgagcattccaaaaagcttttgtcatgaccttcgctcttgatgggtttgcttttgctctaactggatcactttcatctcttggtacccattgctttgtttttttctttgtcttcaggatcacactggtaaagtcatgtttcatctcctgttaaaatttttcaaagaaattccacatgctcttgttgccacttgtttaaaatttgcattgaaggcactgcttttgtctgtggccgatctgagcacaatggttttagtacccatcaagcagaaagtttgttcaacttaaatttttttgttagatttgtatacgctgaatgaatttatatgtctatggtattggctgttgtttgtgctgttaatcattggatctctacatttaggttacaaacgggatgaattttttcctaaaaaatttatgttgatagtctgctactgcaggcttcatcttcaatatcatcttgtcccttcttacaatgaattatcctatttataaactgctgatttcttaggggcattgtttctataaagttttcgtaaagcaccagtgattttaccattcttccactcaaacttcaccataaatttgatgttttgttcttgcttcaattttagcagaattcatgttgctctgttagggtgcttttcaaaccaatgtcttatccttcttagtgcctcaaactacatcttgttcagatgtgttataacaagttagtaccagcttattttggtgcaaaattttattgaaattcatgcatagtgttttcataaaacatatgttacacgaactttttgaagatcccttgtacctgtagtccaaaattcagaagttactaaagaatgtaaaataaaaataagtcttcttcctatgcttgttttcacttacccagtttccttcctcatcttcctgatggattaaaaaaaaaatgacatgatctaaaaaatatgatctattttaggtctaaggacatgtataggttgaaagtgaaaggactgaaagagttatcacatgcaaatagtaactaaaagagagctgggacagtttgctaatatcagacaagatagatttttagttaaaaactcttataaacacttaagaggctgggtgtggtggctcatgcctgtaatcccagcactttgagaggctgaggtgtgtggatcacttgaggtaaaacttcatctttactaaaaatacaaagattagccgggcatggtggtgtgtgcctgtaatcccagctactcaggaagctgaggcagaagaattgcttgaaccagggagacggaggttgcagtgagccgagatcaagccattgcactccaccctgggcgacagaacaagactgcctcaaaaacaaaaaacaaaaaacaaaaaaaaccctcttataagagacaaggaagagcattaaatagaagagtcgatacaccaagaagatataacaattataaacatgtatgtactgaacatcagagctccaaataacctgaagcaaatattgacctcattgagcaacagacagatctaaaataataactggagactttaatatgccactttcaataatgggtagaacaactagacagatctagtctagttagaagtagagtggaattataggcatggtggctcacgcctataatcctaacattttacgagactgaagtgggaggattgctggagctcaggagtttgagaccagcttggataaatagtgagaccttgtctctactaaaaattaaaaaattagctgggcatgttattgcacccctgttgtcccagctacttggaaggctgaggtgggaagaggaagattgtttgaacccaggagtttgaggttgcaatgaactgtgatcatgtccttgcactctagtctgggcaacagagtaagaccttgtctcccccactaactccactgcccccccccaaaaaataaaaaaaacaaaacaaaacaaagaaataaaagactttaacaccgctgtaaaccagttgggcctaataggcatgtatactccactcagtagctatttttctcaagtgcacatagaacattcttcaggatagaccatatactatgccataaaattagtcttaataaatttaaaaagattgaaattacacaaagtgccttttctaatcacaatggaatgaaagtggaaatatgagaatgagaactggaaaattcacaaatatgtggaaattaacacacttaaccattgggtcaaaaatcacaaggtaaattagaaaatatcgagacaaaaacacagcataccaaaacttaggggttgcaatatatatatcacttcatacaattggcttttcaaaatcagttaagacaaaaggtaaacatttatataattacaggtactctttcttttttgttgggcggtggtgggtggtacgtggatttgaattgctgtttgaggtcacttgcttccaggcttttgcatttcttttaagggggatcttccaggaacaaaatctgttttattgctttttaaaatctgagaaggtctgtttcgccttcagttttgaaatgtagttttgctagatataagattggttgacaggttttttttttcttttatttgaacactttgattatgttatctcattgttttctgtctgccattgtttctgcttagaagtcagctgctaatcttactgggttccattttaaaataatgagtcgtttggttcttgctgcttttaagattttctccttgactttgactttcaacatttttactgtgaggcatctgtctggatgtccttgcctttctctgagttaaaatacattgagtttcctggatgtgtggtttattgtcttcagtacatttgtggagttttcagccattatttctttgaattttttttcccctctaccactttttctcctctccttttagagtaccaaactgtgcctattggtgtcccacatagctctaagattttccaatttactgttgagcccccccaccctttatttttaaatttccattattgtaattttcagcttcataatttttatttggttcttttttgtagtttacatctcttcattgatctctatctgaggtgatattgtcattatgctttcctttacttttattatttatttattctttttttagagacggagtctctctctgtcgcccaggctggagtgcagtggcgcgatctcggctcactgcaaactccgcctcccgggttcacgccattctcctgcctcagcctcccgagtagctggaactacaggtgcccgccaccacgcctggctaattttttatatttttattagagatggggtttcaccgtgttagccaggatggtctcaatctcctgaccttgtgatctgcccacctcggcctcccaaagtgctgggattacaggcgtgagccaccgtgcctggcctgcgttttacatttaagtctatgatccattttgagttaatttttgtatgaagtgtgacctaaatttacaggttgaagttttttttttaagttttttgtctatggatgttcaattatttcagcaccatttattgaaaaggttatccttccattattgaattgctttggatatttgtaaacgtgtttagggaaaaactctcctcaaactgtgtttttcctctactgtcataccacagcaataatcaacacagaagaagacttctgtgatcacacacatggggttgttttccccacacaccaagcagcagacagcagcctgagtgtcctctaattcagttcgacactatctccgggtcattggtgtcagatcccacaggttgagggctccgtacctaagactactcccctaacacacacaccagtcataagtcggggcctccagaacttctgaccaaccagcttcaagttggggctcccatggccccctctttgggttcattaatttgctggactggcgcacagaactcagggaaacacttatttacgcttactagtttattataaagaatattgcaaaggttacagatgaagggacgtgcagggctacgtatgggggaaggggtgtgaaactttcatgtcctccctggatgctccacccaccaggaacctctgtgtgttcagctgtcttgaagttcactgaaccctgtcctcttgggtttttatggaagcttcatgacatcaacattcctaccccaagggcatagatgggaccctacatgagagagtcttaagacccgcaatcaaaaagtcaggggaacattaagtgtggaaagcaggcaggagaaagaggcctgcctctgaggcctaacacttccaacattataatgaaagactggaataaaggctatgggagttaaggccaggaaccatggaagaagaccaatagatatcatagcaccacaataaaataacaggcatacttgtgtgggtcatttctgggttctctgttctgttctgttactctatgtgtgtattcttttgctcataccaacacagtcttgactagctatgtagttggccttcagtgaggtctttttcgattgttttagctattttggagctttgccttccatgtaagttttataatgagtttttatctacagaaatccttgctgggatcttgataggaattgtattaacctatagaacaatttggacagaattgacatctttactgagtcagtatattgctgagaacatagtataacatattgctatttgtttagttttttttttttttttttttgagaaatggggtctcatgctgttgtccaggctggagtgcagtggtgtcatcatagttcactgcagcctcaaactcctggactcaagcagttctctcaccacattctcttcagtacctagactacacaggtgcatgccactaaactcagctaacttttaatttttttttagtgacatggtcttgttgcccaggctggtctcaaactcctggtcttgaagtgatcctcttgcctcagtctcttgtatttgtttagatttctgatttatttcatcagcattttggaatttttagcatatagggcctatacgtattttgctaagcgtatacttaaagtatttaattttctatggagcagttgtaaatggtattgttaaaaatttcagtttctgcgtgtttattgttaatatatagaaaagtaaatgatggctgggcacagtggcttatacctttaatcccagcactttgggaggccaacgtgagaggatcacttgagttcaggagttcaagaccagcctgggcaacatagcgagactccatcactacaagaaattaaaaaaaaaaaaaaaaggccaggtatggtggtgtgcacctgtaatcctaggtacttggcaggtggagggcaggaggatccgttgagcccaggagttcaaggttacagtgaggtatgattgcaccattgcactccagcctgggcaacagagtgagaccctgtgtctctagaaagaaaagagaagtgattgatatttgagtgttgatcttgaattcttcctgaactcattatttctagaatttttttttgtagatcctcagtaacattttaagatttgttttgaagtgttttatcttttttctattgtgatgtattcttatttcataatgaccaaatattgtggggttttaggatgaaggctgttgaaatccatatatcaattttatgccccatcacattgatgatttttcttatttataattttttctttagttgattctcctggattttatagataaaagagtcatataatctgcaaatagttacagtttacctttttttcccccaatttttatactcatttttttccctcatttaattatctaagacttccaagatagagttaaataatgctggtaataccattttctggctttagactcttagacttgtttgctttttttttttttcttcaaggcattgcatgctagtaggagttcattttatttcagtaggtagaatgcaaatagagtaaaacatatagtaaatttcagttctctagtgtgttctagtattggggtgttctgttttgttaaatttatgggaacctgaaggttgacataaatacttttacttcaacagttctactgttgaaagtcaatattataggccttcctgctttctgtagagtggccaatatttgatttctttgtagattttgcagcactttattttcttcattcttattttatcatacttgtcaatttagaaaacagtattgataggaatgtatattgatctcaggactttactggagagttgattttcttctttttattttaaggaggatccttaaaaattattggggaactcttatttgttgtcatttgatttcttcttctgagatgaggattacaaaacaattctaactaatggagcttttcagtttttcttttttattacgagatggggtctttgctttgttactcaggctggagtgtagtaatgccatcagagctcagtgcaacctcgaactcctgggcttaagtgatcctcccacttcagcctcttgagtagctagtactacagccatgagccacgtgccaccacacccggctaattaaaaaaatttttttttttgtagaggtgggtctcactttgttgcccaagctggtttcgaactgctgggctcaagtgatcctcctgccacagctatccaaagtgctgggattacaggtgtgagccactgtgcccgcctgagcgtgcgtttatagtctcataaatgagcaacattcctccatatatagctcctgctgatgaaaagtttggtgtgctgatatttttcttttcttttctttctttcttttttttttttgagatggagttgccaggctggagtgcagtggcatgatctcggctcactgcagcctctgcctcccgggttcgagcaattctcctgcctcagcctcctaagtagctgggattacaggcatgcgccaccacacccagctaattttttgtatttttagtagagactaattttttgtatttttagtagagggtttcaccatgttggccaggatggtctagatcttctgaccttgtgatctgcccgtctcggccccccaaagtgctgggattacaggcgtgagccactgctcctggcctctttttttttttttttttttttaagataatgtctcactctgttgcccaggctggagtgcagtggcgtgatcttggctcactgcaaactccccctcccaggctcaagtaatcctctcaccttggcctccctaagtgctgggattacaggcatgagccactgtgcctagcctagtgtggtgatatttcaagaacactttacaaagctttattctacttgctacagcttcagcatcaagatcctgactctgtagttttcttgtgatataaaccaactacatttagggttcattttcttatcttttactcaccccagtcttaattttgttgcacagtggaaagcacatgaacttcatgaggttcagaaactgggtataacacagctgcttctctttgaatcctaatgaccttgaataagttatccaaactctaatcctcaaaatggaggataataatacctcagaaggctatatttaaagatgctgtgaagtaccacatgtaaattatctggtacagaatttacctttgttgattctcagtaaatgtttgctgcctctcccctgaaacaaaatgaaatggtgtgtgtgaatagctttgtgagctttaaataatataattaaatagaagccattattctgtttcctctttcagaaatgggcattaataacataatttataatctcaatagtatcatgtgcttggcccaggtacatgcccaggtttggtattctttagatttttgtttcttcttgccctacatacttcgaaagcccttggagaaatcctacagcaaattcacatgatttatgaaaccaacagttgactaattcttactctgtttctttgactaattcttagtctatgtatccacatatatgaaactaaatccacctgttaccttctttttatggtatctgggttctcctactttgccctactcctttccccactaagaaccttgaacctcatggaatttattagctagcatataccctggtctcttcctgttttggtatttctggttggattgactgtgataatccttattggatattcaactaattgtctaaaataagcttacatatcatgagttaagaggtatagtgccaaggacttgaaaagcttgaactcctaggacttacttgctgcagtccagtttagagagaaattaatgatttctgaaaatgttcttagcactcaagagcattgagatattatcaaatattcattaaacatttgtgtgcgtagcactttctgggaacccagatggatgtaaaacgtgtatgctttggtcctgagtttcttccttccagggtagtctagttagagttcagaataactcaaaaaagttgaaatgtaagacattaagccttttgaatacaaaatattatggataatatgtgcttataaatttgaagactttgtcctgtttattttttataaagtatggtgaattttgttttcctttacctgtgaactagaaataaaaataccctgtggggtcattgtgatgtttaaatgagattggatatgtaaagcccagttataatatataaacttacatatattctttctaatacatacaattagtatttagaattctaatttctaattgtatactattttttaaattaaacaagtaatatgatacatggttaaaaaaaatgcaggcagaacaaagtaagtattcttctcacttcagacccgaggttcttccatatgttcttctgtaccaagagtatggttttaaatatttttcattaattattctagaacatatgcacttacatatacttacatatttttataacatataagtgggaacatattattcatgttgtcttgtatcctgtgtttttcatttaaaaagagatttttggctatattccctgtcaacaaatatagcttttaagtacattattcttttattattgattgctgagtattctgtcgtttggatatgtgataatataactgatattttccccagcactcctttaatgcattttttcaaaactttcatcttcttaggatcaactcactatcctgaaggtccattctcccaagaagaggggacagaaagacagatctatttgtaagaaaggcttgggtatcccatgaacgagccaacagaaaaccgattggggtgcagcaggactccagagccagatataaggctcagaaaagggcaccaactggatggtacacgaagaggtgataatgacagccaccaaggagatttggagcccattttagaggcatctgttctatcttcccatcataaaaaa

SEQ ID NO: 1409 - DNA, 255 bp, Homo sapiens
  full length sequence of bloodCirc_15760
ggctatggaacacacctgatgaatcatttgaaagaatatcacataaagcatgacatcctgaacttcctcacatatgcagatgaatatgcaattggatactttaagaaacagggtttctccaaagaaattaaaatacctaaaaccaaatatgttggctatatcaaggattatgaaggagccactttaatgggatgtgagctaaatccacggatcccgtacacagaattttctgtcatcattaaaaagcagaaggag

SEQ ID NO: 1410 - DNA, 126 bp, Homo sapiens
  full length sequence of bloodCirc_09205
actcctgtggaagaggtccctgctgctattgccccattccaggggagggtgttgattggtgtggggaagctgttgcgtgtctatgacctgggaaagaagaagttactccgaaaatgtgagaataag

SEQ ID NO: 1411 - DNA, 323 bp, Homo sapiens
  full length sequence of bloodCirc_14782
tgaacagcagagaatttcaaaggaccttgctaatatctgtaagacggcagctacagcaggcatcattggctgggtgtatgggggaataccagcttttattcatgctaaacaacaatacattgagcagagccaggcagaaatttatcataaccggtttgatgctgtgcaatctgcacatcgtgctgccacacgaggcttcattcgttatggctggcgctggggttggagaactgcagtgtttgtgactatattcaacacagtgaacactagtctgaatgtataccgaaataaagatgccttaagccattttgtaattgcaggag

SEQ ID NO: 1412 - DNA, 367 bp, Homo sapiens
  full length sequence of bloodCirc_17376
tcacagcaaactgtacaatggcagttgagtgggttttgaaaaacgtctgaattgtagtgtctacatctaccttctgccttctctctaccctttgaaaaaaaataaatggcatgtttgagaagagagctctattaaaagaggaatattgcaaatggcttcagattctatgagtagtaaacaagctaggaatcacattacaaaggggaaaaggcaacaacagcaccagcaaataaagaacagatcctcaattagtgatggtgatggagaagattcctttatttttgaagcaaatgaagcttggaaagattttcatggttctcttcttcgattttatgaaaatggagaactctgtgatgtcacactcaag

SEQ ID NO: 1413 - DNA, 222 bp, Homo sapiens
  full length sequence of bloodCirc_22074
gtcactgctgaaactcaagagaaagaagacgttatcacacatttgcaagagaaggttgcatccttggagaagagactagaacagaacttatcaggagaagaacacttgcaagaactcctgaaagagaaaacacttgctgagcagaatttggaggataccagacaacagctcttggcagccagaagcagccaggctaaggccattaacaccctggagactcgg

SEQ ID NO: 1414 - DNA, 319 bp, Homo sapiens
  full length sequence of bloodCirc_09111
gagaggcacatgatcatgcacaagcgcacccacaccggggagaagccttacgcctgcagccactgcgataagaccttccgccagaagcagcttctcgacatgcacttcaagcgctatcacgaccccaacttcgtccctgcggcttttgtctgttctaagtgtgggaaaacatttacacgtcggaataccatggcaagacatgctgataattgtgctggcccagatggcgtagagggggaaaatggaggagaaacgaagaagagtaaacgtggaagaaaaagaaagatgcgctctaagaaagaagattcctctgacagtg

SEQ ID NO: 1415 - DNA, 250 bp, Homo sapiens
  full length sequence of bloodCirc_12648
tgaaaaatgtgaggttttacaatattctgcaagggaagctcaagattcaaaaaaggtggtagaggacattgaatacctgaagttcgataaagggccgtggctcaagcaggacaatcgcactttataccacctgcgattactggttcaggataagtttgaggtgctgaattacacaagcattcctatctttctcccggaagtcaccattggagctcatcagactgaccgtgtcttacatcagttcagagag

SEQ ID NO: 1416 - DNA, 307 bp, Homo sapiens
  full length sequence of bloodCirc_11683
gaaatcagaaaagttgtacagagtttagaacaaacagctcgagagattttaactctactgcaaggggtccatcagggtgctgggtttcaggacattccaaagaggtgtttgaaagctcgagaacattttggtacagtaaaaacacatctaacatctttgaagaccaaatttcctgctgaacagtattacagatttcatgagcactggaggtttgtgttgcagcgcttggtcttcttggcagcatttgttgtgtatttggaaacagaaacactagtgactcgagaagcagttacagaaattcttggca

SEQ ID NO: 1417 - DNA, 1099 bp, Homo sapiens
  full length sequence of bloodCirc_04141
gtatggcctcacaagtcttggtctacccaccatatgtttatcaaactcagtcaagtgccttttgtagtgtgaagaaactcaaagtagagccaagcagttgtgtattccaggaaagaaactatccacggacctatgtgaatggtagaaactttggaaattctcatcctcccactaagggtagtgcttttcagacaaagataccatttaatagacctcgaggacacaacttttcattgcagacaagtgctgttgttttgaaaaacactgcaggtgctacaaaggtcatagcagctcaggcacagcaagctcacgtgcaggcacctcagattggggcgtggcgaaacagattgcatttcctagaaggcccccagcgatgtggattgaagcgcaagagtgaggagttggataatcatagcagcgcaatgcagattgtcgatgaattgtccatacttcctgcaatgttgcaaaccaacatgggaaatccagtgacagttgtgacagctaccacaggatcaaaacagaattgtaccactggagaaggtgactatcagttagtacagcatgaagtcttatgctccatgaaaaatacttacgaagtccttgattttcttggtcgaggcacgtttggccaggtagttaaatgctggaaaagagggacaaatgaaattgtagcaatcaaaattttgaagaatcatccttcttatgcccgtcaaggtcaaatagaagtgagcatattagcaaggctcagtactgaaaatgctgatgaatataactttgtacgagcttatgaatgctttcagcaccgtaaccatacttgtttagtctttgagatgctggaacaaaacttgtatgactttctgaaacaaaataaatttagtcccctgccactaaaagtgattcggcccattcttcaacaagtggccactgcactgaaaaaattgaaaagtcttggtttaattcatgctgatctcaagccagagaatattatgttggtggatcctgttcggcagccttacagggttaaagtaatagactttgggtcggccagtcatgtatcaaagactgtttgttcaacatatctacaatctcggtactacag

SEQ ID NO: 1418 - DNA, 456 bp, Homo sapiens
  full length sequence of bloodCirc_02328
ggggattcccgaagtcttccgttttctgagaatgtgagtgctgttcaaaaattagacttttcagatacaatggtgcagcagaaattggatgatatcaaggatcgaattaagagagaaataaggaaagaactgaaaatcaaagaaggagctgaaaatctgaggaaagtcacaacagataaaaaaagtttggcttatgtagacaacattttgaaaaaatcaaataaaaaattagaagaactacatcacaagctgcaggaattaaatgcacatattgttgtatcagatccagaagatattacagattgcccaaggactccagatactccaaataatgaccctcgttgttctactagcaacaatagattgaaggccttacaaaaacaattggatatagaacttaaagtaaaacaaggtgcagagaatatgatacagatgtattcaaatggatcttcaaag

SEQ ID NO: 1419 - DNA, 417 bp, Homo sapiens
  full length sequence of bloodCirc_17863
ctgatgttctaatcatgtcagataaagatgatattgagactccactgctaactgaagcagcccccatccttgaagatggaaactgtgagccagccaagaattctgagtctgttgaccaaggtgccaaaccagagagtaaatcagaacctgtagtttccactcggaaaagaccagagaccaaaccttccagtgaccttgagacttcaaaagttctccctattcaggataatgtttccaaagatgtaccccagaccagatggggttattgggggagctggggcaagtccatactctcctcagcctcggctacagtagctacagtaggacaaggcatttcaaatgtcatcgagaaggcagagacttcccttggaatccctggtcccagtgaaatttcaactgaagtcaagtatgtagcag

SEQ ID NO: 1420 - DNA, 409 bp, Homo sapiens
  full length sequence of bloodCirc_16668
aagtgtcattgttgcagcaaaaaagtcagcagtctcaccttccacctttaatacaagcatacctaccaatgctgtcagtgtggtttcctcagtagattcagcccaagcctcagatatgggaggagaatcaccaggcagtagatcatctaatgcaaaattgccctcagttccaacagttgattcagtttcacaagatccggtttcaaatatgagtattacagagaggcttgaacacgctttggaaaaggcagctcctctccttcgtgagatttttgtggattttgcaccttttctttctcggacacttttgggtagccatggacaagaactgcttatagaaggaacaagtctggtttgcatgaagtcgagtagttcagttgtggaattggttatgctactgtgttctcag

SEQ ID NO: 1421 - DNA, 140 bp, Homo sapiens
  full length sequence of bloodCirc_23105
gaagaaaatgaaaaaagaagtcatcataaagaccactcagatagtgaatctacatcgtcagataattctgggaggaggaggaaaggaccctttaaaaccataaagtttgggaccaatattgacctatctgatgacaaaaa

SEQ ID NO: 1422 - DNA, 474 bp, Homo sapiens
  full length sequence of bloodCirc_01954
aaatatggctacacacacctttctgcaggagagctgcttcgtgatgaaaggaagaacccagattcacagtatggtgaacttattgaaaagtacattaaagaaggaaagattgtaccagttgagataaccatcagtttattaaagagggaaatggatcagacaatggctgccaatgctcagaagaataaattcttgattgatgggtttccaagaaatcaagacaaccttcaaggatggaacaagaccatggatgggaaggcagatgtatctttcgttctcttttttgactgtaataatgagatttgtattgaacgatgtcttgagaggggaaagagtagtggtaggagtgatgacaacagagagagcttggaaaagagaattcagacctaccttcagtcaacaaagccaattattgacttatatgaagaaatggggaaagtcaagaaaatagatgcttctaaatctgttgatgaa

SEQ ID NO: 1423 - DNA, 300 bp, Homo sapiens
  full length sequence of bloodCirc_08564
cttttaggtttgtttgaataagagatctgacctgaccggcccaactgtacaactcttcaaggaaaattcgtatttgcagtgggaagaataagtaacattgatcaagatgaatgccatgctggagactcccgaactcccagccgtgtttgatggagtgaagctggctgcagtggctgctgtgctgtacgtgatcgtccggtgtttgaacctgaagagccccacagccccacctgacctctacttccaggactcggggctctcacgctttctgctcaagtcctgtcctcttctgaccaaaga

SEQ ID NO: 1424 - DNA, 428 bp, Homo sapiens
  full length sequence of bloodCirc_20352
gccagtctatccatatggggatggggaagccttggcattgtcctttttctgataacctttggaccctttgtaatattttatttgacattttatatcctctgctttgtgggtgggggtttagtggttactctcctgtttggaaaaacaaactcagagaagtacctagaacagtgtgaacactcatttcttcctccaacatcacctggggttcctaagtgcttagaagaaatgaaacgggaagccaggactattaagattgatagaagattgacgggtgccaatataattgatgaacctctccagcaagttatccagttttccttgagggattatgtccagtattggtattatacactaagcgatgatgaatcttttcttcttgaaattaggcagactcttcaaaacgcactcattcagtttgctactag

SEQ ID NO: 1425 - DNA, 294 bp, Homo sapiens
  full length sequence of bloodCirc_11008
atcagcaatcgagtcctgtatgtgtttttcacacatgtgcaagaactctttggaaatgtggtactaaagcaagtgatgaaacctctgcgatggtctaacatggccacgatgcccacgctgccagagacccaggcgggcatcaaggaggagatcaggagacaggagtttcttttgaattgtttacatcgagatctgcagggtgggataaaggatttgtctaaagaagaaagattatgggaagtacaaagaattttgacagccctcaaaagaaaactgagagaagctaaaagacag

SEQ ID NO: 1426 - DNA, 510 bp, Homo sapiens
  full length sequence of bloodCirc_22402
acttcatgggagactgtagggtgtaagaaaaagaattttgcaaaagaaaattcagaaaacaaagagaatagagagaagaaaagcgagaaagaatcgagtcgtggacgtggaaacaacaaccggaaaggaagaggcggcaatcgtggcagagaatttagaggtgaagaaaatggaattgattgcaatcaagtggacaaaccttcagatcgtggcaagcgagcccggggtagaggatttggacgtggcagagggagaggggcaggaaggttctcaacccaaggcatggggacatttaatcctgcagactattcagattctacatctacagatgtgtgtgggacaaagctagtagtttgggaagctgctcagaatggtgcagatgagggaactgaactggcatcaaatactcacaacatagctcaggatctgtcaaacaaaagttcttatggactcaaaggggcttggaagaattctgtggaagagtggacaacagaagactggactgaagat

SEQ ID NO: 1427 - DNA, 273 bp, Homo sapiens
  full length sequence of bloodCirc_21830
gttcgagaacttgtcttggacaattgcaaatcaaatgatggaaaaattgagggcttaacagctgaatttgtgaacttagagttcctcagtttaataaatgtaggcttgatctcagtttcaaatctccccaagctgcctaaattgaaaaagcttgaactcagtgaaaatagaatctttggaggtctggacatgttagctgaaaaacttccaaatctcacacatctaaacttaagtggaaataaactgaaagatatcagcaccttggaacctttg

SEQ ID NO: 1428 - DNA, 197 bp, Homo sapiens
  full length sequence of bloodCirc_12329
atttctcgaatgctggcagccaaaaccgttttggctatccgttatgatgcttttggtgaggattcaagttctgcaatgggagttgagaacagagccaaattagaggccaggttgagaactttggaagacagagggataagaaaaataagtggaacaggaaaagcattagcaaaaacagaaaaatatgaacacaaaag

SEQ ID NO: 1429 - DNA, 517 bp, Homo sapiens
  full length sequence of bloodCirc_15468
aacaagttgaaatcatcgcagaaggataaagttcgtcagtttatgatcttcacacaatctagtgaaaaaacagcagtaagttgtctttctcaaaatgactggaagttagatgttgcaacagataattttttccaaaatcctgaactttatatacgagagagtgtaaaaggatcattggacaggaagaagttagaacagctgtacaatagatacaaagaccctcaagatgagaataaaattggaatagatggcatacagcagttctgtgatgacctggcactcgatccagccagcattagtgtgttgattattgcgtggaagttcagagcagcaacacagtgcgagttctccaaacaggagttcatggatggcatgacagaattaggatgtgacagcatagaaaaactaaaggcccagatacccaagatggaacaagaattgaaagaaccaggacgatttaaggatttttaccagtttacttttaattttgcaaagaatccaggacaaaaaggattag

SEQ ID NO: 1430 - DNA, 246 bp, Homo sapiens
  full length sequence of bloodCirc_04828
gatgacgctgtcagtatagaaagtggtacaaacactgaacgccctgatacacctacaaacacgccaaatgcacctggaaggaaaagttggggaaagggaaaatggaagtcaaagaaatgcaaatattctttcaaatgtgtaaatagtctcaaggaagatcataaccaaccattgtttggagttcagtttaactggcacagtaaagaaggagatccattagtgtttgcaactgtaggaagcaacaga

SEQ ID NO: 1431 - DNA, 119 bp, Homo sapiens
  full length sequence of bloodCirc_16490
aattcggttccctcaaaattataaaggcaggaaagctcaagacaaagaaatccaacaaggctagtgatttcagtgatatggagaattggccaacaccaagtgaattagtgaacactgga

SEQ ID NO: 1432 - DNA, 343 bp, Homo sapiens
  full length sequence of bloodCirc_01030
agagaagattgaaaaagcatcccaggtagtcttcatgagtgggaaagaaataactgtggaacaccctgacacgaaacaagtttataattttatttatgatgtttcattctggtcttttgatgaatgtcatcctcactacgctagccagacaactgtctatgagaagctagcagcaccactcctagaaagagccttcgaaggcttcaatacctgtctttttgcttatggtcagactggctctggaaaatcatatacgatgatgggatttagtgaagaaccaggaataattccaagattttgtgaagatcttttttctcaagtagccagaaaacaaacccaagag

SEQ ID NO: 1433 - DNA, 193 bp, Homo sapiens
  full length sequence of bloodCirc_19420
agactgtgcagttgatccaacttgtgttttgtgcatggagtgctttttgggaagtattcacagagatcatcgatataggatgacaacatcaggaggtggaggtttctgtgactgtggtgatactgaagcctggaaagagggtccttactgtcaaaaacatgaacttaacacctctgaaattgaggaagaagag

SEQ ID NO: 1434 - DNA, 301 bp, Homo sapiens
  full length sequence of bloodCirc_14185
cacaacctccaagagggaaaacatttctccagattatccactcacccttctagaaggtctaacgaccattagtcatttttgtcttttggaacaagccaaccaaaacaaaaagaccatggctgcaggtgatcctgccaacttgaggaatgccagaaatgccattttggaagagctgcctcgaactgttaacaccatggcccttctctggaatgttctcagaaaggaggagactcaaaagagacctgtcgatctcctaggggccacgaagggatcctcttccgtttactttaaaaccaccaaa

SEQ ID NO: 1435 - DNA, 226 bp, Homo sapiens
  full length sequence of bloodCirc_03718
agtgaaattcacatgtctgaagaagctatacaggacatattggaacagacagaatcagacccagcatttcaggcactctttgatctctttgactatggcaaaacaaagaataataaaaatatatcacaaagtatttccagtcaacctatggaatccaatcccagtatagtcttagcagatgaaactaatctagcagttaaaggttcttttgaaacagaagaatctg

SEQ ID NO: 1436 - DNA, 209 bp, Homo sapiens
  full length sequence of bloodCirc_09613
gattctgttataataatagattcaagtcctactgctttaaagcatccagagaaaaatcagaagaaacttcagtgtttgaatgatgtgctaggaaaaaaacttaacacatccactaaaaatgtacctggaaaaatgaaagtcgctcctttatttcttgtcagaaaagcacaaaaagcagctgatcctgtccctagttttgatgaaagcag

SEQ ID NO: 1437 - DNA, 299 bp, Homo sapiens
  full length sequence of bloodCirc_06750
gtggtgatggcacttctcaaatactggccaaagactcacagtccaaaagaagtaatgttcttaaacgaattagaagagattttagatgtcattgaaccatcagaatttgtgaagatcatggaacccctcttccggcagttggccaaatgtgtctccagcccacacttccaggtggcagagcgagctctctattactggaataatgaatacatcatgagtttaatcagtgacaacgcagcgaagattctgcccatcatgtttccttccttgtaccgcaactcaaagacccattggaacaa

SEQ ID NO: 1438 - DNA, 683 bp, Homo sapiens
  full length sequence of bloodCirc_01018
ggtgatcgagtgattcttggtggagatcattattttagatttaatcatccagtagaagtccagaaaggaaaaaggccatctggaagagatactcctataagtgagggtccaaaagactttgaatttgcaaaaaatgagttgctcatggcacagagatcacaacttgaagcagaaataaaagaggctcagttgaaggcaaaggaagaaatgatgcaaggaatccagattgcaaaagaaatggctcagcaagagctttcttctcaaaaagctgcatatgaaagcaaaataaaagcactggaagcagaactgagagaagagtctcaaaggaaaaaaatgcaggaaataaataaccagaaggctaatcacaaaattgaggaattagaaaaggcaaagcagcatcttgaacaggaaatatatgtcaacaaaaagcgattagaaatggaaacattggctacaaaacaggctttagaagaccatagcatccgccatgcaagaattctggaagctttagaaactgaaaagcaaaaaattgctaaagaagtacaaattctacagcagaatcggaataatagggataaaacttttacagtgcagacaacttggagctctatgaaactctcaatgatgattcaggaagccaatgctatcagcagcaaattgaaaacatactatgtttttggcag

SEQ ID NO: 1439 - DNA, 134 bp, Homo sapiens
  full length sequence of bloodCirc_16470
gggcctgaattaatgaataaatatgttggtgaatctgaaagagcagttagagagaccttccgaaaagcaagagcagtggcgccttccattattttctttgatgaactggatgccttagcagttgaaaggggcag

SEQ ID NO: 1440 - DNA, 456 bp, Homo sapiens
  full length sequence of bloodCirc_09778
gtacaaagacaaagaaacaaactacattggcatttaagccaatcaaaaaaggaaagaagagaaatccctggtctgattcagaatcagataggagcagtgacgaaagtaattttgatgtccctccacgagaaacagagccacggagagcagcaacaaaaacaaaattcacaatggatttggattcagatgaagatttctcagattttgatgaaaaaactgatgatgaagattttgtcccatcagatgctagtccacctaagaccaaaacttccccaaaacttagtaacaaagaactgaaaccacagaaaagtgtcgtgtcagaccttgaagctgatgatgttaagggcagtgtaccactgtcttcaagccctcctgctacacatttcccagatgaaactgaaattacaaacccagttcctaaaaagaatgtgacagtgaagaagacagcagcaaaaa

SEQ ID NO: 1441 - DNA, 3178 bp, Homo sapiens
  full length sequence of bloodCirc_05143
tgctactcattgagtttccttgtgaggagattgtgtggcgaggacccagcaagacaagctactatcccaaaaaagctacttatatgaacttcatttccggtttctttcaaattgaaggtaaattccaagatgaagcttttattctattctctgaccaaagtgttggaaaaagaaggaatttgttaccattttcatttctaacatactaaaacagaaaacaaaaaaccccaaaatcaaaaacacttttaaaaagaacatggcgttaagattagtttgttcagtttccctgtagaaaataatttatggaaagataataaaagattattctgaacactaaaacaagaaaactaaaaaatgaattatcaatattgagaatccaatagacagagttaaccagttagatggagtagaagagataattagtgaattggaagatagctacaaagaatgaagcactgagagaaagatggaaaatataagactagagggtaacaaattcatgctacagttggaatatgtaacatacttctggagttctgtaagattagaggagagaaaatagagcaagagaaaatacaaagttgtactgaaaatacaaagttgaacatgcaagaagcaataaaattaatgacaatgaaaaataagtgtgtaattctaaataaatgttgcctgtagaaaacaatagtgtcttgttggattaattgtataattgataagatatatgcaaatagcaataaagagactggagataaagtgacaggaataaatttagtcaaactgttttgggcttttctatgtctgtgagtagaatttgaatatcataatcaaggaccgtataaatctacacccagatatatatacacaaaggaattgtagcaaatgatatgtgaaagaatgttcattgtagcattattaataatagctcaaaaataagctgcccaaatatatatcaaataaagatggataaataattacagtaaaatcataaaatggaaaaatatacagaagtgaaaataaatgaatcacatgtacatgcaaccatgtgattaaatttcagatacataatgttgagtccaggaagccatgaataaggacatataggattgcacctatacacagttcaaagcagaccaaacgaagctattgagtttagggttgcatgctttgttcgtaaagtacaaagaaaataaaaaaagatcattataaattatggatgtacttatcataagaggtgtgaagaaaggtgtaggggattggaaagtggcattgaggtaaacctagcctcttagcaatgttccatgtctcgccctacataatggttacatgagtgtttatgatacattgctatgttttccatttttgttttggcccatttctaagtgtgtagtctagttataaaaattattaattaggagaaattttccatgaaaattattattaccctgctcattatatactgaagggaaaaatccactatttgtatacattcatgtataactctaagagattttaagaagaaactttctgattttagttgcaacttttggaaatttgacatgatgtttcctgccaaccccagatttttcaacaggtttttcttttaggtttaattattgacttcatatgacaaaactttgacattctccaactatttttcccttgtatcctgaattcctgacacaacaagtgtggacatatttcccacacttttggtttagcagaatacctatgtcacttatgtttttctgcaagagaaaatcctccaaaactacattagatatttgtatctcatatgtctttggatttcatttttctaagctgggtttgatggatggctgtggtgattggagatgggccacgtactgcatcttgaagatagagtttggatgatttaggctagatcaggcagtggcattctgactccattagtttctcattcttcttctgggaacagtgtaatagccagatgatgtccttatggtaaatggaaaagagcaagaaactccaatgtggaagccatcttaaatctctgtgtaaagtctactaatttcctgttcattgaagcaagttacaggagtgcacacgcatatatatatgtgtgtatatgtgtgcatgtgtatgaataacaacactgaccataaattatgaagccgagtacatttcacatatatatgtatgtttattatatgatagtttattgtatgatatttcatttgaagaattatctctatttataattaagaacatatagcttttatcagcaaattattgctgttttccattgtaatttgtaccacatgtatgaacttaactatcattgtttgaacatctaattttttggatggtaaagacattcaactctaaatcaatgaggagaatgtatctttggggtaggttttatttcattatgaattcttattttatgttgttgttagataatgatgcacacaattaaatttgagtgacaaacatacgtagagtaaattttgtatatgtataccaaaaacagtactaaagaatactagatttataccagtatgtgaatagcttagaaaaaaaattcgtttgtataataggaatgaagaaacataatcatgatcatttcagtgctgttataattttttatgtgtagttagaaaagagatttcttccactttttaattaaagaaagccttttttgaagttgacatctgatgtcaagtatttccatttaatttgcttagccacctctgagcccctgaatttccaattatctcctttgtctcccattcctaatattcctcaaaaaaattcaaatattccttctcttaaaaaaaactcaatgtaaagagggtatagaaactatggatcataactgaatgaaacattctgcaaatattacaaattatctgtctaatcaatatattgatgataggaaacgtattaatgatatgttttattgggggtgggcagtgagctgaggatcctcaggcatctctttctatttttattttgtttctctacgtagtttctccagcatttggctctaggtgccaagggcacatgtgacaagaaggtgccagctttataaaccttggaacttcttctgtgtcagttctgagacatacagtttactaaaacacatcatgaaggcctgttttgaagagaaggggaataagactgcatctgttcatatgag

SEQ ID NO: 1442 - DNA, 323 bp, Homo sapiens
  full length sequence of bloodCirc_06260
gtatccacaaattacccattatcaaaaacaaatagttcatcaaatgatttggaagttgaagatcgtacttcgttggttttaaattcagacacatgctttgagaatttaacagatccctcttcacctacgatttcttcttatgagaatctgctcagaacacctacacctccggaagtaactaaaattccagaagatattctccagcttttatcaaaatacaactcaaacctagctactccaatagcaattaaagcagtgccacccagtaaaaggttccttaaacatggacagaacatccgagatgtcagcaacaaagaaaactg

SEQ ID NO: 1443 - DNA, 256 bp, Homo sapiens
  full length sequence of bloodCirc_22228
actgggccagtgccattcgcgtcgcagctctggactgcatggaagagaagaaccaggccgtgtgccatgactacgacatccacttctaccccaccttccggtattttaaagcatttacaaaggagtttacaactggagaaaattttaaaggacctgaccgagagctgcgaacagtcagacagacgatgattgacttcctgcagaaccacacggaaggaagccggccccctgcctgcccgcgcctagaccccattca

SEQ ID NO: 1444 - DNA, 320 bp, Homo sapiens
  full length sequence of bloodCirc_13448
gtcaactttgtagtgtgccaactctttgccttgctagcagccatttggtttcgaacttatctacattcaagcaaaactagctcttttataagacatgtagttgctacccttttgggcctttatcttgcacttttttgctttggatggtatgccttacactttcttgtacaaagtggaatttcctactgtatcatgatcatcataggagtggagaacatgcacaattactgctttgtgtttgctctgggatacctcacagtgtgccaagttactcgagtctatatctttgactatggacaatattctgctgatttttcagg

SEQ ID NO: 1445 - DNA, 526 bp, Homo sapiens
  full length sequence of bloodCirc_15357
gtgattgaagatagtactggagtccgccgggtggtggtcacaccccagtctcctgagtgttatcccccaagctacccctcagccatgtctccaacccatcatctccctccctatctgactcaccatccacattttattcataactcacacacggcttactacccacctgttaccggacctggagatatgccgcctcagttttttccccagcatcatcttccccacacaatatatggtgagcaagaaattataccattttatggaatgtcaacctacatcacccgagaagaccagtacagcaagcctccgcacaaaaaactgaaagaccgccagatcgatcgccagaaccgcctcaacagccctccttcttctatctacaaaagcagctgcacaacagtatacaatggctatgggaagggccatagtggtggaagtggcggaggcggcagcggtagtggtcccggaattaagaaaacagagcgacgagcaagaagcagcccaaagtcgaatgattcagacttgcaag

SEQ ID NO: 1446 - DNA, 116 bp, Homo sapiens
  full length sequence of bloodCirc_09002
gtctcttttattcaaaaccttgtattttgtgtggaaagagtttaccgtgtgcctgactttggtgtctgggaaagaggaagcaaatataataatggcagcacagagctacattcgag

SEQ ID NO: 1447 - DNA, 388 bp, Homo sapiens
  full length sequence of bloodCirc_06393
aattctgcttggtcagaatcgtgatggcattgtgttcagcactgatgactattttcaccatcaagatgggtacagcaaaacaagctatcgatcagggaagatctccagttataatagataacactaatatacaagcttgggaaatgaagccatatgtggaagtggccataggaaaaggatacagagtagagtttcatgaacctgaaacttggtggaaatttgatcctgaagaattagaaaagaggaataaacatggtgtgtctcgaaagaagattgctcagatgttggatcgttatgaatatcaaatgtccatttctattgtaatgaattcagtggaaccatcacacaaaagcacacaaagacctcctcctccacaggggagacagag

SEQ ID NO: 1448 - DNA, 4200 bp, Homo sapiens
  full length sequence of bloodCirc_13458
gctcaaaccaccaaaggtccctcttgctacttgcccactcatggactggcagggtaatttgcacctcagcatttctggaacattgcagatagaacaactctgaagattcttgttctggcagttaagtgttctggccgagaagcaacacacatcacttctgctaacaattcaccaaccaaaactcgtccccacaagggactaggaaatacatcctctgtctacccagaaggagaagagaatcagatataggtgactggtactaaagaccatcacagttgtttatggaccattattctgtttggggtttgtttttaaatgtggtaggcagtataatgcagtggtcaggaattcaaattctagatctagactacctgatttgtaacgagttacactagttaaactgtttcagtctcggtaaatggagataatagtagagttctcctcatagggttattgtgaagattaaatagattataaatgtaaggtgcttagagtgttgtgtcagcttgggtcctctgaggagcaggtgccaaggagcaattagatgagcaagtgatgagctggggaagttgtctatgagacagtgctctggggagctggcagaagggagagctgcggactgcaggacagtcccctctggaggagagggggaaggaaggaaggctgggcagggggaggcacaggctgtagggagtatggccttggcatgaatctgggcagggagcctggctgtggagaagtgaagttctaaggaggtcccagcatggccttggcatgagcctggtgatgggtatcaagtgtgctgcagatgatgctcttggtcaattatgccccctgcgggtggagatttgaggggtgtgtactcatacctgccacataagcacacgattaatattaacaacgtggcttatgaaacaggagtgtaacttggtttttaccaaaaggaaaaccagttaccccagttacattaattggataatctaggtttgtttttcctactgatgggaaatatctagctttttttttttccctactgatgggaaatggaaatgctgcttctctgtagatgtgaaatgctctatttgtgtaacagtcccctgtggatggccctgtgcatgtgtgctctgacagtgtgtagtggatcttcatgtgtgcctaagcctcttgtgcttttgtgcactttatctggggtaaagttgtaaatgttcagtttcttggtaaaggatattatgttttaagttttggtggccattgtccaattttctttaaagagctgccccaagttacagtcagattaacagtgtagagcaccagctttctcatgtccccagcagcactgagaggcggaagatagtgcctcactgatggtttatttcacacttcgttacttatggttgagagagaatatttttcagattttattggacattgatatttgtaaattgttcattccttttgcccagttttctattgagtggttcatagtttctcatgggtatccaagagttctggatatgtagaggtggagggtcaatctcatcacttccttgttttaaaaatcttccatggttttgtcatcactatgggctcaaacgccgtggtgtggcatacaaagccctcacttctgaaccaccctgcttccagcctcatctcccatgatccctggccacgcggtgcgtttgcgctttcatgtccaagtgcttccttcatgttgttttcttccttacaatgccctttcccttattgtccaacagagtgcttctcacaccttgaggatcataagaacctgtgtttccattttattttttatacatatttttgggcctatctccccaaagactttgattcagtgtccagtgtgaggcctgatctcattttctttatctgaacgatgacaatgttgaaaagagatgatttcaaagattctgtaaaatcctgtatgtgtgtggtccttgacatactctttcttggaaggaatcatactttgtcttgtaatgtatgaatagactgatatggaatgggggaagggaagctgccccctcctatggttgtggagatcagcgggattgggaaatgctgcccgccctgcttacccctcacatcctttgtggcaggcaccccttcaggcgtgctcttctgtggtgtcttgaaggatgttctatataaccattaaaaagactctgatgttgggttgacgttccttctgtatatgtttatgttttccattaggttctaaagtcatcctgagctaggactgggactcatgcatgtttagatttcccatgtttgcccatagtagatgctcagtaaatttttgttataataattaaattaggagctatctgaaaaagaaagaaataagagatacttgaaacaaagttttaaactgtaagaagccatgtagatgtgagtagttaatatgaagaacacaaatttttccattctattcactttttgcttaattaaaaaaaatgccattagaaccctttagaaggcaggaagtattagaaccttttggaaagacattttgcttttattgagtctgttttaaagaacaattgtttcttagacagtgtacaacaacgttctactgtttttctccttgatatgtgagaaagagaacatacttgtctgtgtctttaggcagagatatttctatgggtctatggaaatagctacatgtagatagtgtgatttgttcacaatttaggtgcctgaaacactgattgttttgttatgtattttttttgcaggttcctaatgtcaatggattttttcctttatttatagactttaaggcctattattcctaagattctatgagaatatgtttcataagggagaaatggagattttggccaggtgtgattgttcatgcctattatcccagcactttgggaggcagaggcaggcagattgtttgagcccaggagttcaagaccagcttgagcaacatagtgacactttgtctttacaaaaaaatgcacagattagctcggcatggtggtgtgtgcctgtagtcccagctacttggaaggctgaggtgggagaattgcccgagcccgggaggtagaggctgcagtgagctgtgatttcaccactgcagtccagcctgggccacagagcaagaccctgtcttaaaaaaaaaaaaaaagaaaaaaaggaaatggagatttttctccagtctatctttacataccatgagagattcttattttcagtctttttatttggagggaaaagagcagcagcagtcttaccagagtgtatttcacttctataagtcaagaacagtttagttcctagtgaactataaggaaatttaaaaattgaggttggtggacttgagcttttcgaaggctgctttgtcccttatctaattcattccttccccttgggagccaatccttgagatgcctcagagctcagctacagtggtgatgtttaggccgcagtagattcccctttactcctattgccatagactgtcctgcatcccaccagatcctccaggccctggtgcccttatagtctcagggaacttggggacattgacccctcccagagcttttgcgaagaaatttagtgctcctctttttcacgggttacagggttccctcagtcattaaaacacgtttctcttccctttaaccgataggtgccctgggctttttgtttctgtgtctgcagaccagtgtcaatcagatttttccaggtgtccttctacacctctccccacgtggccacacctgtctcctgccaggtctagcagagacagtattggtgggcattggcccatcacttggaacttgaggctcatccttgggatttccctcaatttttgtttttgttttgttaacttggaaggtcaatttttgtgtaaccttggtgtttttgtcctgagaatttcaatgtaacatgatatgaaaaattcaggtctgtgttgctaatacaaaattttaatttttctttacaggtcaactttgtagtgtgccaactctttgccttgctagcagccatttggtttcgaacttatctacattcaagcaaaactagctcttttataagacatgtagttgctacccttttgggcctttatcttgcacttttttgctttggatggtatgccttacactttcttgtacaaagtggaatttcctactgtatcatgatcatcataggagtggagaacatgcacaa

SEQ ID NO: 1449 - DNA, 231 bp, Homo sapiens
  full length sequence of bloodCirc_16825
catatgctactttgattgaaaatgattcaaatccagaagttagacgggcagtgttatcatgtattgcaccatcagcaaagactttgccaaaaattgtagggcgcaccaaggatgtgaaagaggctgtcagaaagctggcttatcaggttttagctgaaaaggttcatatgagagctatgtccattgctcagagagtaatgctccttcaacaaggtcttaatgacagatcag

SEQ ID NO: 1450 - DNA, 224 bp, Homo sapiens
  full length sequence of bloodCirc_23126
gaaaaatccaagctggagagtgagctagccaactttgggcctcgcattaatgatatcaagaggatcattcagagccgagagagggaaatgaaagacttgaaggagaagatgaaccaggtagaggatgaggtgtttgaagagttttgtcgggagattggtgtgcgcaacatccgggagtttgaggaagaaaaggtgaaacggcagaatgaaatcgccaagaagcg

SEQ ID NO: 1451 - DNA, 445 bp, Homo sapiens
  full length sequence of bloodCirc_20269
tgaacttgaagatgatttacttggagaagatttgctatctggcaaaaagaatcagtcggatttgtcagatgaagagctaaatgatgatcttttgcagagtgataatgaagatgaagaaaatttcagttctcagggtgttacaattagtctgaatgctacatctggcatggttacatcatttgaactctctgacaacactaacgaccaatctggagaacaggaatctgagtatgaacaagaacaaggagaggatgaactggtttatcacaaatctgatggatcagaattgtatactcaagagtacccagaagaaggacagtatgaaggccacgaagctgagttgacagaagaccaaatagaatatgtggaagagccagaggaggagcagctttacactgatgaagtgttagacatcgagatcaatgaacctttagatgaatttaca

SEQ ID NO: 1452 - DNA, 136 bp, Homo sapiens
  full length sequence of bloodCirc_09112
aataccatggcaagacatgctgataattgtgctggcccagatggcgtagagggggaaaatggaggagaaacgaagaagagtaaacgtggaagaaaaagaaagatgcgctctaagaaagaagattcctctgacagtg

SEQ ID NO: 1453 - DNA, 412 bp, Homo sapiens
  full length sequence of bloodCirc_06268
tacacgagcaagaagccattaactctgacccagagttgtctaattgtgaaaattttcagaagactgatgtgaaagatgatctgtctgatcctcctgttgcaagcagttgtatttctgagaagtctccacgtagtccacaactttcagattttggacttgagcggtacatcgtatcccaagttctaccaaaccctccacaggcagtgaacaactataaggaagagcccgtaattgtaaccccacctaccaaacaatcactagtaaaagtactaaaaactccaaaatgtgcactaaaaatggatgattttgagtgtgtaactcctaaattagaacactttggtatctctgaatatactatgtgtttaaatgaagattacacaatgggacttaaaaatgcgaggaataataaaag

SEQ ID NO: 1454 - DNA, 270 bp, Homo sapiens
  full length sequence of bloodCirc_16155
gtcaatatagtctatatttaaacagtatttctaatcagccaaaggatgagaacattatgggattattcaaaaaaactgaaatggtttcatctgtcccagctgaaaataaatctgtcttaaatgaacatcaggagacatctaaacagtgtgagcaaaaaattgccatagagaatgaatggaaaccagctgatatattcagtactctgggggaaagggaatgtgatagaagttcgttggaagcaaaaaaagcccagtggaggaaagagctag

SEQ ID NO: 1455 - DNA, 534 bp, Homo sapiens
  full length sequence of bloodCirc_17913
gaagaagagattaaatctctgactgctgaaattgaccggttgaaaaactgtggctgtttaggagcttctccaaatttggagcagttacaagaagaaaatttaaaattaaagtatcgactgaatattcttcgaaagagtcttcaggcagaaaggaacaaaccaactaaaaatatgattaacattattagccgcctacaagaggtctttggtcatgcaattaaggctgcatatccagatttggaaaatcctcctctgctagtgacaccaagtcagcaggccaagtttggggactatcagtgtaatagtgctatgggtatttctcagatgctcaaaaccaaggaacagaaagttaatccaagagaaattgctgaaaacattaccaaacacctcccagacaatgaatgtattgaaaaagttgaaattgctggtcctggttttattaatgtccacttaagaaaggattttgtatcagaacaattgaccagtcttctagtgaatggagttcaactacctgctctgggagagaataaaaag

SEQ ID NO: 1456 - DNA, 262 bp, Homo sapiens
  full length sequence of bloodCirc_04638
ctctgttagaacaaggcaataaactgcgtaatgccatggtgatttctgcaatgaaatcaagcccagagaccagcatgttgttggaccaagttcatcctcctattaatgaagattctcttagagcatcaacacagatcagagccttttctaggaatcggtttaaagaccacattgaagatcacctcctcccttcaactgagaatacattttggagacatgacacaaaagctgataccagagctatacagctgctattaggcag

SEQ ID NO: 1457 - DNA, 788 bp, Homo sapiens
  full length sequence of bloodCirc_02840
ggtttgtgtttagtgaatcagagggatctgcattagaacagtttgaaggtggcccctgtgctgttattgcacctgttcaggcatttcttttgaagaagctcctgttttcttcggagaagtcttcttggcgggattgttcagaggaagagcagaaggaactcctttgtcataccttgtgtgatattttagaaagtgcttgttgtgaccactctggatcatactgcttggtttcatggttaagaggaaagacaactgaggaaactgctagtatttctgggagtcctgcagagtctagttgccaagtggaacattcttctgccttggctgtcgaagagcttggctttgagcgatttcatgcattaattcaaaaaagatcgttcagaagtttaccagaattaaaagatgctgtcttggaccagtattcaatgtggggaaataaatttggagtattgctttttctgtattctgtattactgacaaagggcattgaaaacataaaaaacgaaattgaagatgcaagtgaacccttgatagatcctgtatatggacatggcagccaaagtttaattaatctcctgctgacgggacatgctgtttctaatgtatgggatggtgatagagagtgctcaggaatgaaacttcttggtatacatgaacaagcagcagtaggatttttaacactaatggaagctttaagatactgtaaggttggttcttacttgaaatctccaaaattccctatttggattgttggcagtgagactcacctcaccgtattttttgccaag

SEQ ID NO: 1458 - DNA, 1073 bp, Homo sapiens
  full length sequence of bloodCirc_07667
tgaaaatgcctcgtgtaaaagcagctcaagctggaagacagagctctgcaaagagacatcttgcagaacaatttgcagttggagagataataactgacatggcaaaaaaggaatggaaagtaggattacccattggccaaggaggctttggctgtatatatcttgctgatatgaattcttcagagtcagttggcagtgatgcaccttgtgttgtaaaagtggaacccagtgacaatggacctctttttactgaattaaagttctaccaacgagctgcaaaaccagagcaaattcagaaatggattcgtacccgtaagctgaagtacctgggtgttcctaagtattgggggtctggtctacatgacaaaaatggaaaaagttacaggtttatgataatggatcgctttgggagtgaccttcagaaaatatatgaagcaaatgccaaaaggttttctcggaaaactgtcttgcagctaagcttaagaattctggatattctggaatatattcacgagcatgagtatgtgcatggagatatcaaggcctcaaatcttcttctgaactacaagaatcctgaccaggtgtacttggtagattatggccttgcttatcggtactgcccagaaggagttcataaagaatacaaagaagaccccaaaagatgtcacgatggcactattgaattcacgagcatcgatgcacacaatggcgtggccccatcaagacgtggtgatttggaaatacttggttattgcatgatccaatggcttactggccatcttccttgggaggataatttgaaagatcctaaatatgttagagattccaaaattagatacagagaaaatattgcaagtttgatggacaaatgttttcctgagaaaaacaaaccaggtgaaattgccaaatacatggaaacagtgaaattactagactacactgaaaaacctctttatgaaaatttacgtgacattcttttgcaaggactaaaagctataggaagtaaggatgatggcaaattggacctcagtgttgtggagaatggaggtttgaaagcaaaaacaataacaaag

SEQ ID NO: 1459 - DNA, 2588 bp, Homo sapiens
  full length sequence of bloodCirc_02854
tttagcaattggagtcgtgttggaagagggctgactgggaacaaaagaagctgatatagtggcagatgcaattagcaagatcaatggttagtgttaaaggttcattgtttggtcattttggttgactgaattgaaagcaattgctatctaaaagactttgccagctgtaatttgctataagagaatgcagaaaagttagttgcccaactttataacatcttggagactgttatttctcaacttgctgtgttcctaggacagtgaccaaaagattcagcttgttcttctcattcaagctcattcaagcttttaatagatactctagaatttctgcatgttcagtatatatacgttttttactttagctgttcacctacttctttcacaaaaatttttgggtccgtgttatagcctttataacagttctttgaaccctaatttattacagctttctgttgcttcagactatgagagttttcgctgatcactacttgaactatagcaaacaccactttgaataacattgggttttctgtttttgtttgtttgtttgttttgcgacagagtctcactctgtcacccaagctggagtgcagtggtgtgatgtcacttcactgcaccctctgcctcctgggttcaggcaacactcctgcctcagcctcttgagtagctgggattacaggcacctgccaccacgcttggctcatttttttttttttttttttttttttattgtcgtagagatggggtttcaccatgttggccagactggtattgaactcctgacctcaggtgatccgtccatctcggcctcccaaagtgctgggattacaggcatgagccaccatgcccagccgggttttctattttaataagatttatataactttgcatttcagtgccttaaattgaccagtttttagaaatgaatataggtgaaaatatttgcctagtaatgatgatggctgatgatactaatagtccatttatgagtgcttatcttccctaagataggtcatcttaaataagatatttctgtgagctggagttacttttttcccattttacagatgaggaaccttaagcttagagtaacctgtcaaagccatgcaggtagactttatcaaactccatccatgcttccaaccttggaagttaaccaagagcttttaaccacttctgcagaagtggttaagaacctatgaaatgtttattaaattcttatctaatatcttcgtaagcctttctgaaaggcacaaaaggtatgacccagttctgtttctaacagagctactaacctagtgaaacttgaagaatagttaacctgttaaattggaacaccaggtgtcactgcagtagaaatgtagcctgggcagaaatcatcatggcttgagatagtctaaaaaagcttctgcagtatcttagtcagcttgggctgctataacaaaaataccatagactgggtgacttagacagcagaaatttatttctcatggttctttgggctgggaaatctgagatcaaagtgctggctaattcatttcctggcaagagctctctttctggtcccaggtgacacatcctttctgtatcatcacatggcagagagatcatttttcttgtgtctgttcttataagagcactaatcctatttataagggctccactctcatgacctaattctcttccaaggaccctacttccaaataccatcacattagcacttagggctttaacatatggatttggaggggtcataaatactcagtccacaggaagtagaggtgagattttagctggcacatagcagaatcaacaatggtaagagaaaatgcaaagcagtggtatatattacatttcatgacttgaatataaatttaaactgttgttaggctatggtctctgtccctttgtgtacttcccatgagcactcatcagaactgcttttcattcagttaggtcttctgtgactagttgggtaatactgaggcatcagtttggtggaagctactgatactgtacttcctcatttagcccagttggttctcagagtttataagtccattggccccttaaggaagtcaatgaaagccatagattctgtctaggaaaaattgtatatacttgaccatgggacctgggattaaatatctctgccctgtcccaacaatatcggcttatcttaaccactctcaaaagcgttggagataaatggcagaaagctactttttatacctcagtagaaaaaaaaaaatgagcaagaacagatatttcacaagagaagatcaatgaccaagcctataaaaaactggtcagccttagtagcagtcaatgaaatgcagattaaaacaagttactattttttagaatatcgattaacgaagattttaaaaatgataatgcaaagtgatagtaaaggtttggtgcaatagacattttcatgcattgctgttggattgtaaattagcgtgttaattctagacccatttttggagtatatgccaggcaccgtaaaagcttccaaccttttgttgcagtaagctcccttggaattctatcatcaagaaataatcaggaactcagaaaag

SEQ ID NO: 1460 - DNA, 3721 bp, Homo sapiens
  full length sequence of bloodCirc_19975
gaacaagcagcaggagctaatggaccataagagggaaatttgttgtttaaacaatgattatcttttatatttggctaacatgaaaaggggaaagtacactttttctgtcacaccgcatgagaaggtaaatggatgagatttagagacagaatttacctgaaaaaaatttatacctgtcttttgaggaaataaagttacctactcacaagacaaaattataaaatgtgcctatatcaagctatgttttgtcaagtcacaaaagaggtcctgtggcaggttgggttccctagaagcagacattgagatggagtttggggtgtgagatgtattttagggatcatccctggggaaaggaagaagaaagatacaggattgagcaggggaggaagccaaactgtgaggcaggcctgacagaaccctagacaagccagtggggccctcagacagtgtggccttcagagttgtctcaagttacccctgccctgtctgaggatgtcgaataccccaagggagggcggttctctgcagctgtggcgatgttgaagtctactgacctggcggctgtctactgactgcactgcccatatatgggccatgagtgagtgcttctttgaagggggatctgggtgatgcatactgttgtctacataggtcttattttgtgactatcagggaaattttgcaattttatccttatatttataattccccaatgtacatcatctttctaagccaagtattctgtgagaattaacattttacagattttagacacgttcaagacaccttttaacatccttattttatttgtttagtgcccttagaattatataggctgtattagcctctagcacaagcatacttttttatattcaaaattcagagcagattgtggcccttcatagagagttaaggtttttcttaatagttatatgggcatttaaggccaaacatgtctttgttttttaatcatttgacaatgatttcaagcttgtagaaacattgcaagaatagtacaaagaactgatatgattttcactcaaattttcaatattaaaattttattatagttgctttatcatattctctctctctctctcaatctgccctccctctcctcttaccattacacattattattattttgaagtttttttttggcttgagagtacattggagacatgatgccccagtactcccttagtacttcagtgactattttctaaaaataaggacatttccctacataatctcagtataaccaccaaaataggaaactagtattgatacaatattaccgtctattacacagattcaattcataattcactaactgtcccaatgatgttctttatatgtccagaatctaagccttgtatttagctgccctggctctttgctctccttcaatctggaatcttcattaatcttgccttatctttaatgattttgacatttctgaagagtacagctatgttttgtttctctacttgggtttatctgatgtttccttatgaataagttgttattttgggcattattaccacaaaagcgatgctatgttctcagttcctcatgttaaaaggtgtggttcaagcttatcttgtacttttcttgccccagccctggcgctaccaaagacttctggtttcttttagtggatgctaaggttgctctttgctactgggtctaagattgctctttactactgaggtgtctttgcttctagatcttttcagtgaacaaacctaggaaatacagatttgcacattatatgtatatatgtatgtacatatatgcatgtacatacatatattgatatggcttggctgtgtccccacccaaatctcaacttgagttgtatctcccagaattcccatgtgttgtgggagggacccagggggaggtaattgaatcatgggggccggtctttcctgtgctattctcgtggtagtgaataagtctcacgagatctgatgtgtttatccggggtttctgcttttgcttcctcctcatttttctcttgccactgccatgtaagaagtacttttcgcttcctgccatgatactgaggcctcctcagccatgtggaactgtaagtccaattaaacctctgtttgttcccagttttgggtatgtctttatcagcagcatgaaaacggactaatacatatgtacattacatgtatatatgtacgtacatatatacatatacatctccatctatctatctattgatcagtgattatctaaaaatatatgttcccactgatctcctcgattccaaacgacagggtttattcttccttcccctttttgtacttgtaggttccttctccaacattagaaaacctggctcccattatcctcagtatatttatttgtttgcccaatttcccctttttatacttaattttacagctgtatgggtcatctccttgacctcaacccactatccccagccaactggttgaatatttggtcccggtcttgctgtctgtgccagctaatttctcagtcctaaccaagggtaactggcccagatacttcttgtttcctagcacttttattattttcttttagatataaagggctgtgtggactctaaaagtgatttggctgagcaggtagcatttggtatgggttatatcataaaacaaatttctattaaaaatggggttatttagtattttagttttttttttttttttttttttttaaagacagagtcttgctctgtctccaggctggagtgcagtggtgtgatgttggctcactgcaacctctgcctcctggtttcaggtgattcccctgcctcaacctcctgagtagttggaactgcaggcacgcgccaccatgcctggctaattttttgtattttagtagagatgaggtttcatcatgttggccagggtgatcttgatctcctgacctcgttgtctgcccaccttggcctcccaaagtgttggaattataggtgtgagccactgcgcctggccgtattttagtttttgtaaaaaaaattattattctagatgtgaatgacagaactttagtgcttagcttaagattctgttatgcaaggcaataacactggcatacatgctagccatttttgatgttaaagatagtttatgaataagaaaccatctatattgttaaggcaggtttttctttggtttcttttggatttattttttggcagcttgataagcaatagctaaaacgagttcttgttgaaccttgtttattggtttgcaataatgagaacagttattgagtccaataattttgtgcttttattttcaagtaacaaagtgttcttattttgtgatgataccacagaaagctggtttaaaagctagttttaaaggatctgtagcttgagaggttgtaatttagaatggagacatggtggtcagaggaaatgagccaaagttaaaagccttttctgtgccattgcatctgtaaccatcctcaaagtactctgcactttatgtcacaaaaaagcctcaaatcctgtgggtaaatgttatctgcaggaacctcatcatttttgaaaacagtacttttatccttagagtgtttgaacaagaaatacaaataatagtattttcttttctttttacaggacaacagatagatagaagtattcttctgctatttttgaataagtgctatgtgatataagaagcaaaatcaaatttaaaattaatggatg

SEQ ID NO: 1461 - DNA, 186 bp, Homo sapiens
  full length sequence of bloodCirc_03181
cgtgacgacagcatgtacgatccctgaatgggcccgtgggcatatttagtcattcatttttgatcaggagaaagaagacagccatcatttgaaaggtaaagcttcagcgactgaaggagtgtggactttttgaatttcaagaacagtaaagttggaacacagcagagggtgtgtaataaaatacag

SEQ ID NO: 1462 - DNA, 397 bp, Homo sapiens
  full length sequence of bloodCirc_15801
gtttaactatagatcaacacatcatcttgcatctcatgggttctatgaatttttaaattggtttgatgaaagagcatggtatccactaggaagaatagtaggtggtactgtttacccagggttgatgataaccgctggccttattcattggattttaaatacattgaacataactgttcacataagagacgtatgtgtgttccttgcaccaacttttagcggccttacatctatatctactttcctgcttacaagagaactttggaaccaaggagcaggacttttagctgcttgttttattgctattgtaccaggctacatatctcggtcagtagctggatcctttgataatgaaggcattgctatttttgcacttcagttcacatactatttatgg

SEQ ID NO: 1463 - DNA, 302 bp, Homo sapiens
  full length sequence of bloodCirc_20062
gaacattttagtggacaaaccaaatgaccaatcttcaagatggtcttcagagagcaactatcctccccagtacttgattctaaagctcgaaaggcctgctatagttcagaatatcacatttggaaaatatgagaaaactcatgtttgcaatttgaagaaatttaaagtctttggtggaatgaatgaagaaaatatgacagagctgttgtccagtggcttaaagaatgattataacaaagaaacattcaccttgaagcataaaattgatgaacagatgttcccttgtcgattcattaaaatag

SEQ ID NO: 1464 - DNA, 348 bp, Homo sapiens
  full length sequence of bloodCirc_09831
ctggacacctgttctgctgttgtgtcctgccattctcctgaagaacagaggcacactgtaaaacccaacacttccccttgcattctataagattacagcaagatggaaataccaaatccccctacctccaaatgtatcacttactggaaaagaaaagtgaaatctgaatacatgcgacttcgacaacttaaacggcttcaggcaaatatgggtgcaaaggctttgtatgtggcaaattttgcaaaggttcaagaaaaaacccagatcctcaatgaagaatggaagaagcttcgtgtccaacctgttcagtcaatgaagcctgtgagtggacacccttttctcaaaaag

SEQ ID NO: 1465 - DNA, 255 bp, Homo sapiens
  full length sequence of bloodCirc_03697
aatgaagaccagcaagaagtaatccttgtcagaacagatcagtctggaagagtatggcctgtgaacacacccggaaaatctctggaatcacaaggaggaagaagaaagagacagatggtttcaacccatgaggaaagagaaagggtcagatactttcatgatgatgataatctaagcctaaatgatttagtcaaaaatgaaaagatgggaacagcagaaaatcaaaacaagctctttatgagaatggcatctaag

SEQ ID NO: 1466 - DNA, 209 bp, Homo sapiens
  full length sequence of bloodCirc_15598
gtaccagcaacttcaaggtttctgccagcccactgttgtatacgcttattgagaaaacaatgcaaaatgtgaagcatccggttactgggcaatttctatatcaggacagcaactgggccagcaaagttgagaaactcactttagacaatgctgctttccctttccttgcatattctggaatcccagcagtttctttctgtttttgcgag

SEQ ID NO: 1467 - DNA, 566 bp, Homo sapiens
  full length sequence of bloodCirc_06663
gtacgtcagcctgtcatatgcatcaacaaccatgtattttgttcgatttgtattgatttgtggttgaagaataatagccagtgtccagcttgcagagtccccatcactcctgaaaatccttgcaaagaaattataggaggaacaagtgaaagtgaacctatgctaagccatacggtcaggaagcatcttcggaaaactagacttgaattactacacaaagaatatgaggacgaaatagattgtttacagaaagaagtagaagagcttaagagtaaaaatctcagcttggagtcacagatcaaaactattctggatcctttaaccttggtgcagggcaaccaaaatgaagacaaacatctagtcacagataatccaagtaaaattaacccagaaactgtagcagagtggaagaaaaaactcagaacagctaatgaaatctatgaaaaagtgaaagatgatgtggataagctaaaggaggcaaataaaaaattgaaattggaaaatggtggtctggtgagggagaatttacgactgaaggctgaagttgataacagatcacctcaaaa

SEQ ID NO: 1468 - DNA, 4530 bp, Homo sapiens
  full length sequence of bloodCirc_22473
aataactacaaaacaaaatttgaagaggagtccaaggcattttctggttccatacttttttcattctcctgttggataccatttctcctgtctgatccaatgctgagctcagtggtaatgaagtgccacattgtgaaagggtaagagaactggtacaaagcgtaccagggaacaaatgaattagtacacctgtcacgtctcactcttgaaggatggcaccttctttgttaattgaaaagaaatgtaaaatgggagaaatagcaaaaaaaaaaaaaaaatatatatatatatatatatatatatatatatatatatttctggctcttctttctttcttctccttcatggcctatgacagcatactgtaatgtctccaagtcttgcattttcatatattattctgatactgtctgcagggagcctagaacggggctgccagagagacagtctgtaattgaaagttctttcaagagaaggacttctatcaggtctgctgagggaataggagctccacctgctgacttttttatgtttgctgactctgaaagaatgcaaaacatgaagaaattgaatggtgttatttcttttgtaatttctcagtggaaatattgttttcaaaattattgataagatgtaccagtctaaccagggctttcaagaagaaaatgcaatctatagcttgttttaagagtggggattatgttggcttccctgggccagtctaaataattactttaatctggaacaacatataaattcataaattgttgccaccacgactcttagggaatcctcgacttttcaaacattgcctctctcagccataaatttacactgcgccactcgcccatgtgtgttttgttttaagaagctgtagtctcttgttacatgtagtttggaagaaatgctagatgtttttgatctaaagaagaaagatcaagtcctagtcaaactttagtattttaaagggcatagacattatttgagtatatgtcgtctgcgtttcagaaagaagctatgcagttttgtataaaagccacataaaaccataaacttgtcatttgtcttttccttgatggaaattgccacgaggaagcgtggaatgcattatcaacatgcttgattgattaactcctgggccaatgggatcatgagggcaggtacacctcctcgctccttacaacctcagtattgtgggtttcatttcttatctagattttgtttactgacaaataataagctacatgactggctggattctactgaaaaaaaaaaaaggaacctttatttatggcttgggttttaggcttagaaagacactttcgcattattttgtatattagcattgtaagtccttttctgtattaatgtaaaccactggaagtggatacagaaatctcctctcaggccctgtaacagaattgactgtacccagataattcttgtggagggatttgttagctagttagccagctagcttttttggtagtcctaataagcttcccccagatctttcttctggtgatacactatgtactccaggagctgccgcctactcattcttcaggagaggtcacatgacccagaactgtacccatactcttggtccaatcagagtttctccctgggatccatatatgcacagtgagaaacagatgccatctccttcctcaaatgttgttgaacctcggctgcttgtggtcatgttctctgccacgtggtgataacctggctggagtaggagaaacaggctagtgctaaaagcaaagtgaaaggctgacagagatgagagctgcagcaggagagaaaaagccacggcagtgttgactgtcttattccagagcccaaggccttgcttcttacagcccctcctttgtttctgtgggttaccctcattgtctccccatttctggattacacaagtctgtgatggatttctgctattcacaaccaaaagaggccttactatcattgcctcgtaaaacagaaatgagagtgatgcaatcaacaattaaatacttacaggtaagggaagaggcctcattttctttattgagactagaattataaaggatagagaaacagaaacagaaaaaaattctctagagtattagattacaacaataactagcatttgtgtagtgctctacagtttttaaagtacttccataatcatttctttcatttgaccctcacaataattctgcaaaatggagaatacagtgtataattatccacatgttgccaacatagcagaatggtgaatggaagtgtttcctgtggttctggaattatagtgaaggctcatggatgaagacaaaggattctgcattttgtgttttatattttgagtccaagggacccccaatttgggggcctagccactttctctacagttttactgggaagggccagttcagagaatccacaaaataaactccaaacccaaagggagtcaagaaaatctcatgtgaatattggggcatctacaagaagtggaagctggcatatcgttccccagctagacatcagtttcaccagcagacctgccttcttgactctaaacagtcagagtacaggaaaggaagatggagagagagaacatggagtgggaaactaatgctcagagaggttactttttcaaggccacaaatagagttagcagctgatctgaggtttgaaaataaccactgatgctcacacagcatgtgtcagatccatggggtaggagtcggccagagacttggtaacagacagattgctggatcccacccctagactctctgattcagttagtttggggtaaggcgcaagactgaatttttcacaagtttccaagtggtgctgatacttctggtccaggaacttagtgggagagaacgactaatctagaccatttcacttcacattctgagcttcttgtacactgtcacactgcatccttttaacaatgcattccctatcctattgcaatactgacatctcatcaatattttaaaacatgcgttttcagaaacaatattttatatcaaatactcacttttagtaatatttctgcaattttgccctatggatctgagatctaacaaatactattctggacatgggctacaacagttgaggctggaagtaaaaatgttaaaccctgctgaccacgttattttaaagtgtattttagttaagaataatatggcttaggagcagggctaaacagtagcagtacacatggggaatgataactttgcttttgcacataaaatgtacctgaagggaaaaaataaagcagaaaataaacaagatgaactgaaaatactgtaacaaatgttgggctgaaatactgccaggcgtggaggtgtaggaaaatgaacacacattttggtggcaaggcacaaaactgtttaaatccttttgcagaagtttctgaaaactgtaattttggcatggatccatgagcagagttattgggcttataatgtaggcaaaccaacaatatctgtaagaattgccttgtccagccttggatgttgcataactcctgtaaaatatcaccttcacatatgccaaagaatggaacagtgaaataaattcagaaattttctctatacaataaagagataccagaaggtgtgaattctcaataaatgatagcttgcttatgctctcttaacaaagtaatattcctacaaagaactaagattgatgtatttgggtatgtatattatttttcattaaaatattttattaagtttagtttactataaaatctaaaactgataacttctggtcagtgttgatgacagagtaggtttggggtgtgagaagctaaggtgcacatgtgtggtagtgacaaaccattttaagagaatgacatccgaaatctgaaacttattacttaaagggcaggggtgcagcaggggccccaaatacagttgttctgcaaagaaataaatgaagtgattgctaccctggagaatgttcatatcagcttcacacttctgatgatagtactgacggacgatcagggtgagggagggatgaggcctgtgctctccccaacatgtacttcatgccccctacctgaaatggtttggctctgtgaacccacccaattctcatttcctgtcaagggagggaacaggtgggaggtgactggatcgtgggggcagtttcccccatgctgttctcatgatagtgagggaattctcatgagacctgatggttttaaagtggcagtttcccctgcccactcgtcttctgccaccttgtgataaaggctttgccttccacaatgattgtaagtttcctgaagcctcccagccatgcagaactgtaagtcagttaaacctctttcctttctaaattacccggtctcaggcagttctttatagcactgtgaaaatggactgatacactacctttctgactgtagggccaagacccagctttacacagaagttgagaagaaagccccctaacccagtgacagaactttttgtctgtaaaccctatctgcaaagtggattttataag

SEQ ID NO: 1469 - DNA, 319 bp, Homo sapiens
  full length sequence of bloodCirc_15073
gtcagcaaaggaggcagaagacaaaattaaaaaggcaatagagaagggagaaactcttcctacagaggccagatttgattccaactgtatcacaccaggaactgaatttatggccaggttacatgaacatctgaagtattttgtaaatatgaaaatttccacagacaagtcatggcaaggagttaccatctacttctcaggccatgagactcctggagaaggagagcataaaatcatggaatttatcagatccgagaaagcaaagccagatcatgatccaaacaccagacactgtctttatggtttagatgctgacttg

SEQ ID NO: 1470 - DNA, 472 bp, Homo sapiens
  full length sequence of bloodCirc_00198
ggaagaggaagaacgtctgagaaataaaattcgagctgatcatgagaaggccttggaagaagcaaaagaaaaattaagaaagtcaagagaggaaattcgagcagaaattcagacagagaaaaataaggtagtccaagaaatgaagataaaagagaacaagccactgccaccagtccctattcccaaccttgtaggaatacgtggtggagacccagaagataatgacataagagagaaaagggaaaaaattaaagagatgatgaaacatgcttgggataactataggacatatgggtggggacataatgaactcagacctattgcaaggaaaggacactcccctaacatatttggaagttcacaaatgggtgctaccatagtagatgctttggataccctttatatcatgggacttcatgatgaattcctagatgggcaaagatggattgaagacaaccttgatttcagtgtg

SEQ ID NO: 1471 - DNA, 195 bp, Homo sapiens
  full length sequence of bloodCirc_13616
gtattagaaaactactcggatgctccaatgacaccaaaacagattctgcaggtcatagaggcagaaggactaaaggaaatgagcagtgggacttcccctctcgcatgcctcaatgctatgctacattccaattcaagaggaggagaggggttgttttataaactgcctggccgaatcagccttttcacgctcaag

SEQ ID NO: 1472 - DNA, 144 bp, Homo sapiens
  full length sequence of bloodCirc_00912
gtgctcaaaaaacatttgttgagtaagtgaacctgagactatcaacaagcattattttaaaatcactagcaaaggagattgtaaaatcaggaagtatatctaagtcacctccagtagccgtaactctaccttgtccagtaaaag

SEQ ID NO: 1473 - DNA, 267 bp, Homo sapiens
  full length sequence of bloodCirc_17336
attgctaagaagcctcgaacgccaacctctggtccagtaatcacgaagctgatctttgcaaaaccaattaatagtaaagcagttacaggacagacaactcaagtttcaccaccagttattgcaggtagggttctttcacagtctactcccggaactccatcaaagaccataacaatatctgaaagtggtgttattggatcaactttaaattctacaacacagacaccaaataaaatagccatctcacctttgaaatcgccaaataag

SEQ ID NO: 1474 - DNA, 444 bp, Homo sapiens
  full length sequence of bloodCirc_09814
atttggaacattgctaccaataaactgacgttcttgaactcctttaagatgaagatgtctgttatccttggtatcatccatatgctgtttggagtcagcctgagtctgttcaaccatatctatttcaagaagcccctgaatatctactttggatttattcctgaaataatcttcatgacctctttgtttggctatttggttatccttattttttacaagtggacggcctatgatgctcatacctctgagaatgcaccaagccttctgatccatttcataaacatgttcctcttttcctacccagagtctggttattcaatgttgtattctggacagaaaggaattcagtgtttcctggtagtggttgcactactgtgtgtaccttggatgctgctgtttaaaccattggtccttcgccgtcagtatttgaggagaaagcatttg

SEQ ID NO: 1475 - DNA, 487 bp, Homo sapiens
  full length sequence of bloodCirc_21876
gtgaaagcactgaaagagaagattgaatctgaaaaggggaaagatgcctttccagtagcaggtcaaaaattaatttatgcaggcaaaatcctcaatgatgatactgctctcaaagaatataaaattgatgagaaaaactttgtggtggttatggtgaccaaacccaaagcagtgtccacaccagcaccagctacaactcagcagtcagctcctgccagcactacagcagttacttcctccaccaccacaactgtggctcaggctccaacccctgtccctgccttggcccccacttccacacctgcatccatcactccagcatcagcgacagcatcttctgaacctgcacctgctagtgcagctaaacaagagaagcctgcagaaaagccagcagagacaccagtggctactagcccaacagcaactgacagtacatcgggtgattcttctcggtcaaacctttttgaagatgcaacgagtgcacttg

SEQ ID NO: 1476 - DNA, 263 bp, Homo sapiens
  full length sequence of bloodCirc_21373
ctttgattagtttgtcctttggaggagcaatcggactgatgtttttgatgcttggatgtgcccttccaatatacaacaaatactggcccctctttgttctatttttttacatcctttcacctattccatactgcatagcaagaagattagtggatgatacagatgctatgagtaacgcttgtaaggaacttgccatctttcttacaacgggcattgtcgtgtcagcttttggactccctattgtatttgccagagcacatctg

SEQ ID NO: 1477 - DNA, 902 bp, Homo sapiens
  full length sequence of bloodCirc_19233
aaaagagtctcatcgtggaaggcaagagggaaaagaaaaaagtagagaggttgacaatgcaagtctcttccttacagagagagccatttacaattgcacaaggaaaggggcagaaactttgtgaaattgagaggatacatttttttctaagtaagaagaaaaccgatgaacttagaaatctacacaaactgctttacaacaggccaggcactgtgtcctcattaaagaagaatgtgggtcagttcagtggctttccatttgaaaaaggaagtgtccaatataaaaagaaggaagaaatgttgaaaaaatttagaaatgccatgttaaagagcatctgtgaggttcttgatttggagagatcaggtgtaaatagtgaactagtgaagaggatcttgaatttcttaatgcatccaaagccttctggcaaaccattgccgaaatctaaaaaaacttgtagcaaaggcagtaaaaaggaacggaacagttctggaatggcaaggaaggctaagcgaaccaaatgtcctgaaattctgtcagatgaatctagtagtgatgaagatgaaaagaaaaacaaggaagagtcttcagatgatgaagataaagaaagtgaagaggagccaccaaaaaagacagccaaaagagaaaaacctaaacagaaagctacttctaaaagtaaaaaatctgtgaaaagtgccaatgttaagaaagcagatagcagcaccaccaagaagaatcaaaacagttccaaaaaagaaagtgagtctgaggatagttcagatgatgaacctttaattaaaaagttgaagaaaccccctacagatgaagagttaaaggaaacaataaagaaattactggccagtgctaacttggaagaagtcacaatgaaacagatttgcaaaaag

SEQ ID NO: 1478 - DNA, 473 bp, Homo sapiens
  full length sequence of bloodCirc_11803
gtgctatacttggtagatcagaaactcaggagtgtcttttctttaatgctaattgggaaaaagacagaaccaatcaaactggtgttgaaccgtgttatggtgacaaagataaacggcggcattgttttgctacctggaagaatatttctggttccattgaaatagtgaaacaaggttgttggctggatgatatcaactgctatgacaggactgattgtgtagaaaaaaaagacagccctgaagtatatttttgttgctgtgagggcaatatgtgtaatgaaaagttttcttattttccggagatggaagtcacacagcccacttcaaatccagttacacctaagccaccctattacaacatcctgctctattccttggtgccacttatgttaattgcggggattgtcatttgtgcattttgggtgtacaggcatcacaagatggcctaccctcctgtacttgttccaactcaa

SEQ ID NO: 1479 - DNA, 274 bp, Homo sapiens
  full length sequence of bloodCirc_03038
agaaagtccatgaaatggaaaaggagcacttaaataaggttcagactgcaaatgaagttaagcaagctgttgaacagcagatccagagccatagagaaactcatcaaaaacagatcagtagtttgagagatgaagtagaagcaaaagcaaaacttattactgatcttcaagaccaaaaccagaaaatgatgttagagcaggaacgtctaagagtagaacatgagaagttgaaagccacagatcaggaaaagagcagaaaactacatgaacttac

SEQ ID NO: 1480 - DNA, 561 bp, Homo sapiens
  full length sequence of bloodCirc_22414
attttctattttgtacatacattattttgtatatactgtatatgatgacttcagtgagcagtgaccattgtcgaggtgctcgggaaaaaccacagatttcagcagcacaatcaacgcaaccacagaaacaagtggtacaggcaacagctgaacagatgcgtctcgctcaagtgatctttgataagaatgattcagattttgaagctaaagttaagcagcttatggaagtgacagggaaaaatcaggatgaatgcatagtggccctacatgattgtaatggagatgtgaacaaagctatcaatatattgctggaagggaattcagacacaacttcatgggagactgtagggtgtaagaaaaagaattttgcaaaagaaaattcagaaaacaaagagaatagagagaagaaaagcgagaaagaatcgagtcgtggacgtggaaacaacaaccggaaaggaagaggcggcaatcgtggcagagaatttagaggtgaagaaaatggaattgattgcaatcaagtggacaaaccttcagatcgtggcaagcgagcccggggtagag

SEQ ID NO: 1481 - DNA, 341 bp, Homo sapiens
  full length sequence of bloodCirc_00555
gaagaagagaatttatccaaagattaaaacttgaagcaacccttaatgtgcatgatggttgtgttaatacaatctgttggaatgacactggagaatatattttatctggctcagatgacaccaaattagtaattagtaatccttacagcagaaaggttttgacaacaattcgttcagggcaccgagcaaacatatttagtgcaaagttcttaccttgtacaaatgataaacagattgtatcctgctctggagatggagtaatattttataccaacgttgagcaagatgcagaaaccaacagacaatgccaatttacgtgtcattatggaactacttatgag

SEQ ID NO: 1482 - DNA, 946 bp, Homo sapiens
  full length sequence of bloodCirc_12529
gttcagccgtctgtatatctccccagatacctgaaactgaccacctgagtacgttttcccattgctgagctgtttccctgatatctggccatgcaacggagatcaagagggataaatactggacttattctactcctttctcaaatcttccatgttgggatcaacaatattccacctgtcaccctagcaactttggccctcaacatctggttcttcttgaaccctcagaagccactgtatagctcctgccttagtgtggagaagtgttaccagcaaaaagactggcagcgtttactgctctctccccttcaccatgctgatgattggcatttgtatttcaatatggcatccatgctctggaaaggaataaatctagaaagaagactgggaagtagatggtttgcctatgttatcaccgcattttctgtacttactggagtggtatacctgctcttgcaatttgctgttgccgaatttatggatgaacctgacttcaaaaggagctgtgctgtaggtttctcaggagttttgtttgctttgaaagttcttaacaaccattattgccctggaggctttgtcaacattttgggctttcctgtaccgaacagatttgcttgttgggtcgaacttgtggctattcatttattctcaccagggacttccttcgctgggcatctggctgggattcttgttggactaatgtacactcaagggcctctgaagaaaatcatggaagcatgtgcaggcggtttttcctccagtgttggttacccaggacggcaatactactttaatagttcaggcagctctggatatcaggattattatccgcatggcaggccagatcactatgaagaagcacccaggaactatgacacgtacacagcaggactgagtgaagaagaacagctcgagagagcattacaagccagcctctgggaccgag

SEQ ID NO: 1483 - DNA, 165 bp, Homo sapiens
  full length sequence of bloodCirc_08578
aataagagtaagagcctgaactatacgggagagaaaaaggagaaacctgctgccgttgccacagccatggccagagttcttcgggaaaccaagccaatccctaacctcatctttgccatagaacagtatgaaaaatttctcatccacctttctaagaagtccaag

SEQ ID NO: 1484 - DNA, 2902 bp, Homo sapiens
  full length sequence of bloodCirc_05946
atgctgcacttaaaaggatgcttgttttgatgtcctgctcattgttttccctatgaagtatcagtaatccatcctagaggtggtgttctttttaagaatttgagaaggaaaacgtagttcccagctacttttatataatgtgagcaaacaaaatatttgttacaacacttcattcaaatttatttaatatcaaggttgtactcagtttaattcatatttccactatgtgattataataataccttttttattttacaaatactgtataaagaaagaatgcaggttactctgtggcatatttctgtaatttagaagtaaagtagcctgagtatagggtttatttctatttttgccataactcctttcactgtaataactaagatatgctagttgcaactttaaagaaatagaataaactagattcaattgcagttcttattttcacccttaatttttcttaatgatagacactttgtcagtacatcttagcatgtctcccttgaatgactactcttttaaactttcaaatctgaggagagctaacataattaggctagtgtctctcatcagtaaaaagtcattccattttcagctgcagctgaaaaggttgaatagcacttctttttgtttaaaccaaggttcagttagaaattgtatcttgacaagcttaaaattaaatctggtaagtgttggtttgatcttaggcttctgtatagatagggatagattttctttagccttgaaggagattagtcagttatagttgtaactcaattgcttttccttatttttctatttagcatttttgttagtgtatttaatcatttccctttcttttcttttttttttaattgcagttgtgcctttaaatggctccagtgaaaagtaagatgtaaatgcagataattacagaacttacatacaaagagtgtgtaagaggggaagggagagtgagaaactcaggcttcacagaggtgacacttgaattggggttaagttgaagaacagacaaacttagacacaaagctatgcaaaaattgtgatgaacaaggaaaaagtaagtttggaaaggaaagcacaggtcagattatatttattctcaggattttggacttttttattagggaaatttaaacaaggggaatgatcttatatttgtattctagaaagattactctggcagcagcagtatgaaggatggcttgtaggagataagagaaatatcttatcaccagggtaaactctcctgtggtaggtaaaactgtggaggtgcattagaatgctcaaaatgagaaagaggctaagtagtgctccctgaagagcaccattatttcacaagttagagagaaaagactcaatggagacttaaaagacaaaacacaaatagggaaacaaagggagatgcggagttatggaagccaagagagaagtggtttatggtgtcagattctcagaggggtcaggtaaaaaaaaataaagtttgaaaacattgatagggaaacttagccacagcagtctctctagattaatgggacagaaaccagattccatttggtaagaagggtacagagaaactagttttctttcaggatacttggctttgaagagatcagagaaccagagatttactagaacagttttgctgtagaactgttaagattttcagatgtacttattgcttatttttgtttcttagatgatggtaattctcatttttagaactggtcatcaggagagtttaaaaaccttttctgctgcttgccctgtgaggtgtttaaacagaagaaccgtatttggggtactgtattttacatcctagccaactgaaaataatctataggctgggtgcagtggctcacacctgtaatcccggcactttgggaggtcaaggtgggcggattacctgaggtcaggatttcaagaccagccttgtcaacatggtgaaactccatctctactaaaaatacaaaaattagctgggcatggtggcacgcacctgtaatccaagctactcaggaggctgagacaggagaattgcttgagcctgggagacggaggttgcagtgagccgagatcgcaccactgcactccagactggctgacagtgcgagactctgtctcaaaaaaaaaaaaaaaaaaaaaaaatctataaatgatgtattaaaaccacaggaggtactgtcttttctcttgctaatatctggcctggaaaaatgaggtataacaattctcgtgtatgaattgtttagaataaaaattgtagtttgaaattttgtagctgtttctaaggaaaaagttaccttttgtgtatcactgtgttagagaagaaagtaagaacagttgcttcagattattttcataacattttcccttgtctgtaggagaaaaatagatatattttgagtactattttaaagtgtttttttttttcttttttttgagatgaggtctccctctgttgcccaggctggagtgcagtggtgtgatcttggctccctgcaacctccgcctcctgagttcaagcaattctcttgcctcagcgtctcaagtacctgggactacaggcctgcaccaccacgcctggctaattttttaatttttagtagagatggggtttcactgtgttggccaggctggtctcaaactcctgacctcaagtgatcctcctgcctcggcctcccaaagtgctgggattacaggcgtgagccaccgcgcctggccccctgaagtgtaaactatccgcatctgtgacaaagcattcagtttctcccctcttccttcagaaaataatctctaacatacagctaattatggactttcctggcacagaaggaatgatgctataacctaactaggtggactgtctgtggatactactggtaattatgacactagtgatttt

SEQ ID NO: 1485 - DNA, 312 bp, Homo sapiens
  full length sequence of bloodCirc_10124
gctgctgagaactagccctagacctctgcgtgagggttcttctgccgaagacatcaccagtgtgtggagcctgccacacccacccgctgccaaaccacggcctttacctgtgtcttccggtgtttcccgtgcgacccatcctgtgggagtgcctcgtgggctgccccagagttcaccccacactcagcagcaccaatggtgaagatgacaagatcgaagactttccaggcatatctgccctcctgccaccggacctacagctgcattcactgcagagctcacttggccaatcatgatgaactaatttccaag

SEQ ID NO: 1486 - DNA, 1546 bp, Homo sapiens
  full length sequence of bloodCirc_18352
gcaagaagatgaaaattttaacagccttttacaaaatggagatattttaaacagttcaacagaggaaaagttcaaagctcatgataaaaaagattttaacttacctgaatatgatttgaatgttgaagagcgattagttctaattgagaaaagtgttgactcaacagccacagctgatgacactcacaaattagatcatatcaatatgaatcttaataaacttataactaatgatacatttcaaccagagatcatggaaagatcaaaaacacaggatattgtgcttggaacaagctttttaagcattaattctaaagaggaaactgagcacttggaaaatggaaacaagtatcctaatttggaatccgtaaataaggtaaatggacattctgaggaaacttcccagtctcctaataggactgaaccacatgacagtgattgttctgttgacttaggtatttccaaaagcactgaagatctctcccctcagaaaagtggtccagttggatctgttgtgaaatctcatagcataactaatatggagattggagggctaaaaatctatgatattcttagtgataatggacctcagcagccaagtacaaccgttaaaatcacatctgctgttgatggaaaaaatatagtcaggagcaagtctgccacactgttgtatgatcaaccattgcaggtatttactggttcttcctcatcttctgatttaatatcaggaacaaaggcaattttcaagtttgattcaaatcataatcccgaagagccaaatataataagaggccccacaagtggcccacaatctgcacctcaaatatatggtcctccacagtataatatccaatacagtagcagtgctgcagtcaaagacactttgtggcactccaaacaaaatccccaaatagaccatgccagttttcctcctcagctccttcctagatcagagagcacagaaaatcaaagttatgctaaacattctgccaatatgaatttctctaatcataacaatgttcgagctaatactgcataccatttacatcagagacttggcccagcaagacatggggaaatgtgggccatctcaccaaacgaccgacttattcctgcagtaactcgaagtacaatccagcgacaaagtagtgtgtcctccacagcctctgtaaatcttggtgatccaggctctacaaggcgggctcagattcctgaaggagattatttatcatacagagagttccactcagcgggaagaactcctccaatgatgccaggatcacagagacccctttctgcacgaacatacagcatagatggtccaaatgcatcaagacctcagagtgctcgaccctctattaatgaaataccagagagaactatgtcagttagtgatttcaattattcacggactagtccttcaaaaagaccaaatgcaagggttggttctgagcattctttattagatcctccaggaaaaagtaaagttcctcgtgactggagagaacaagtacttcgacatattgaagccaaaaagttagaaaag

SEQ ID NO: 1487 - DNA, 594 bp, Homo sapiens
  full length sequence of bloodCirc_18457
aaaaggaaccagtgatttacttgcttgggaccccctatttggaccatctcttgattcatcttcttcatcttcactaacttcatcatcatcagccaggcccacaactcctctttctgtaggcaccattgtcccacctccgaggcctgcttccagaccaaagcttacttcaggcaaactcagtgggattaatgaaatacccaggccattcagcccacctgtaacttccaacaccagcccacctcctgctgcaccattagcccgggcagaaagttcttcttctatctcatcatctgcttcattgagtgctgccaatactccaacagtaggtgtgtcacggggtcccagccctgtcagccttggaaatcaggataccttacctgtggcagttgcccttacagaatctgttaatgcctactttaaaggagcagatcccaccaagtgtattgtgaagatcactggtgatatgacaatgtcatttccaagtggaattattaaagtcttcaccagcaatccaactccagctgtgttgtgcttcagggtgaaaaatatcagcagactagagcagattcttccaaatgcacagcttgtgttcag

SEQ ID NO: 1488 - DNA, 411 bp, Homo sapiens
  full length sequence of bloodCirc_12608
tactcgggtttcatattttgctgtttttgatggacatggaggaattcgagcctcaaaatttgctgcacagaatttgcatcaaaacttaatcagaaaatttcctaaaggagatgtaatcagtgtagagaaaaccgtgaagagatgccttttggacactttcaagcatactgatgaagagttccttaaacaagcttccagccagaagcctgcctggaaagatgggtccactgccacgtgtgttctggctgtagacaacattctttatattgccaacctcggagatagtcgggcaatcttgtgtcgttataatgaggagagtcaaaaacatgcagccttaagcctcagcaaagagcataatccaactcagtatgaagagcggatgaggatacagaaggctggaggaaacgtcag

SEQ ID NO: 1489 - DNA, 174 bp, Homo sapiens
  full length sequence of bloodCirc_20565
ataacctgaggaccatggatgctgatgagggtcaagacatgtcccaagtttcagggaaggaaagcccccctgtaagcgatactccagatgagggcgatgagcccatgccgatccccgaggacctctccaccacctcgggaggacagcaaagctccaagagtgacagagtcgtgg

SEQ ID NO: 1490 - DNA, 570 bp, Homo sapiens
  full length sequence of bloodCirc_18886
gaggaattaattccaatgagtgtgaaaatgtatcaagaaaaaagaaaatgtcagaggaatttgaagccaatactatggattctctggtagacatgccatttgctactgtagatattcaggatgactgtggaatcactgatgaacctcaaataaatttgaagagaagtcaagaaaatgaatgggtcaagagtgatcaagtaaagaagaggaaaaaaaagagaaaagattatcaacccaactatttcctgtccattccaatcaccaacaaagagattataaaaggaattaagatcctgcagaatgcaataatacaacaagatgagcgactggccaaagcaatggtcagtgatggttcctttcatattaccctgctggtgatgcaattattaaatgaagatgaagtaaacattggtattgatgctcttttggaattgaaaccattcatagaagaactcctccagggaaaacatttgactttgccctttcaagggattggtacttttggaaatcaggttggatttgtgaagctggcagaaggagatcatgtaaactcacttttggagatagcag

SEQ ID NO: 1491 - DNA, 682 bp, Homo sapiens
  full length sequence of bloodCirc_06726
ctcaaatctaatccaagtgaaaatgaagaaaaggaagcacagtctcaacttataaaatctgatgaaatgcagcgtttgcgttcacaagcacttaacgcttttggaagtggagattatactgctgctatagccttccttgataagattttagaggtttgtgtttgggatgcagaactacgggaacttcgagctgaatgttttataaaagaaggagaacctaggaaagctataagtgacttaaaagctgcgtcaaagttgaagaatgataatactgaagcgttttataaaataagcacactgtactaccaactaggagaccacgaactgtccctcagtgaagttcgggaatgtcttaaacttgaccaggatcataaaaggtgttttgcacactataaacaagtaaagaaacttaataagctgattgagtcagctgaagagctcatcagagatggcagatacacagatgctaccagcaaatatgaatctgtcatgaaaacagagccaagcattgctgaatatacagttcgttcaaaggagaggatttgccactgcttttctaaggacgagaagcctgttgaagctattagggtttgttctgaagttttacagatggaacctgacaatgtgaatgccctgaaagatcgagcagaggcctatttgatagaggaaatgtatgatgaag

SEQ ID NO: 1492 - DNA, 262 bp, Homo sapiens
  full length sequence of bloodCirc_11894
cctagaggcaaccaaaaacatggtgcatcctttatcatcacgaaagcaattcgagatcgtttattatttttacgccaatacatctggtacagcccggcaccttttttgctccctgatggactggttcgcttggttaataaacagataaactggcatttggtacttgcaagcaatggaaagcttttggctgctgttcaagatcagtgtgtggaaatcaggtctgcaaaagatgattttacatccattattgggaaatgtcaag

SEQ ID NO: 1493 - DNA, 565 bp, Homo sapiens
  full length sequence of bloodCirc_08083
aggtctgttaccatctgaagggatagttcatcttcattcagaaactaagccaaagaccaaaaacattgatcctgtaaacaaggttcaaaacaaattacactctgcaaataaaggaaggaaaacaaattcaagtgttaaattgaaatactctgatgtccaaactgccgacgatgttgccattccagaggatttctcagacttttcccttgcaaaaacaattagcaaaattgaagggcaactggaggaagaaggcttacctgaatatatagatgatattttttctggtgttagtaatgacattggaacagaagcacagatcagatttctaaaggccaaactccatgttatgcaggaggaattggataatgttgtatgtgaatgcaataaaaaggaggatgaaattcagaatttaaagtctcaagtaaaaaattttgaagaagattttatgagacagcagcgaacaattaatatgcaacagtctcaagtagaaaaatacaaaactcttttcgaagaagcaaacaaaaagtatgatggattacagcaacagttgtcttcagtagaaagg

SEQ ID NO: 1494 - DNA, 185 bp, Homo sapiens
  full length sequence of bloodCirc_01398
agccttagatcgtctgtcagtgaaggaattcgggcagttgatgaacgaatgtctaaacaagaggacattaggaaaaaaaagatgtgtgtattgaggcttatacaagttattcggtcagttgagaaaattgaaaaaatcttaaactctcaaagttctaaagaaacctctgcactagaagcaagcag

SEQ ID NO: 1495 - DNA, 407 bp, Homo sapiens
  full length sequence of bloodCirc_00433
gcatcctgacaaaaacaaagatcctggagcagaagacaagttcattcaaatcagtaaggcttacgagattctttcaaatgaagaaaagagatcaaattatgatcaatatggagacgctggagagaaccagggctaccagaagcagcaacagcagcgagagtatcgcttccgccatttccatgaaaatttttattttgatgaatccttttttcacttcccttttaattctgaacggcgggactcaattgacgaaaagtatttattgcacttttcacattatgtgaatgaagtggttccagatagcttcaagaaaccctacctcatcaagatcacctccgattggtgctttagctgcattcatatcgagcctgtgtggaaagaagtcattcaagaactggaagaattgg

SEQ ID NO: 1496 - DNA, 233 bp, Homo sapiens
  full length sequence of bloodCirc_15074
attcctgaatttgacaacttgtacctggatatgaatggaattatacatcagtgctcccatcctaatgatgatgatgttcactttagaatttcagatgataaaatctttactgatatttttcactacctggaggtgttgtttcgcattattaaacccaggaaagtgttctttatggctgtagatggtgtggctcctcgagcaaaaatgaaccagcagcgtgggaggcgttttag

SEQ ID NO: 1497 - DNA, 427 bp, Homo sapiens
  full length sequence of bloodCirc_16004
gaacacctttgtcctagaatattgtggagaggtactcgatcataaagagtttaaagctcgagtgaaggagtatgcacgaaacaaaaacatccattactatttcatggccctgaagaatgatgagataatagatgccactcaaaaaggaaattgctctcgtttcatgaatcacagctgtgaaccaaattgtgaaacccaaaaatggactgtgaacggacaactgagggttgggttttttaccaccaaactggttccttcaggctcagagttaacgtttgactatcagttccagagatatggaaaagaagcccagaaatgtttctgcggatcagccaattgccggggttacctgggaggagaaaacagagtcagcatcagagcagcaggagggaaaatgaagaaggaacgatctcgtaagaaggattca

SEQ ID NO: 1498 - DNA, 479 bp, Homo sapiens
  full length sequence of bloodCirc_18658
aaaaaatgcctgtcttaaaggctgaagcgtcacattataactctgacttaaataacttgctgttctgctgccagtgtgtggacgtggtattttacaaccccaatttaaagaaagttgtagaggcccacaagatcgttctctgcgctgtaagccatgttttcatgctgcttttcaatgtgaagagtcccactgacattcaggattccagtatcatccgaactacccaggatctttttgctataaacagagatactgcatttccaggtgctagccatgaatcttcaggcaacccaccattacgagtcattgttaaagacgccctcttctgttcttgtttatcagacatccttcgcttcatttattcaggtgcttttcagtgggaagaattggaagaagatatcaggaagaagttgaaagattctggggatgtttcaaatgtaatcgagaaagttaaatgcattttaaaaacaccaggaaag

SEQ ID NO: 1499 - DNA, 251 bp, Homo sapiens
  full length sequence of bloodCirc_14519
atttggagcaagaggtggtggtggccttcccccgaagaaatttggtaatcctggggagcgtttgcgtaaaaaaaagtgggatttgagtgagctccccaagtttgagaaaaatttttatgtggaacatccggaagtagcaaggctgacaccatatgaggttgatgagctacgccgaaagaaggagattacagtgagggggggagatgtttgtcctaaacccgtgtttgccttccatcatgctaacttcccac

SEQ ID NO: 1500 - DNA, 435 bp, Homo sapiens
  full length sequence of bloodCirc_13180
actgcagttcgtcatgaatcatgcagtggtctctataagttatccctgtcagggctggatggaggagactcaatcaatcgttcttttctgctattggctgcctcaacattattgaaatttcttcctgatgctcaagcactcaaacctattaggatagatgattatgaggaagaaccaatattaaaaccaggatgtaaagagtatttttggttgttatgcaaattagttgacaacatacatataaaggacgctagtcagacaacgctcctcgacttagatgccttggcaagacatttggctgactgtattcgaagtagggagatccttgatcatcaggatggtaatgtagaagatgatgggcttacaggactcctaaggcttgcaacaagtgttgttaaacacaaaccaccctttaaattttcaagggaaggacag

SEQ ID NO: 1501 - DNA, 2140 bp, Homo sapiens
  full length sequence of bloodCirc_00915
ggtcagatgaaagtgagatccatacatccttcttcagcaacttgtgcctctgctctgcacctcccgcaattaactactgaaaaaagaacacagcttcacaaaagtgagttgaagtgcatagcacagaaccatcaaattccatatttagaacaagaaaaattctataagacactatttctgcagagagaactctctcatttaaaacaagaaccataataaaatgcataccccacagaatatttgggacattatttgagaacaatatttgcatccaagttacaggtttcttccaggtttttccttctaaatagggagtatgtatttgccttatatgtgaacaatttaagggttcatttaagaaatttcctcaggcagaagaaaactaatgcaaagaataattcaagcccctgccactgagaagacagaaacttttgtatttcaaaatgtctcttgtaatctcagttcaggcaatatgatacatcaaaaaatgagaaattataaaataagaggagtcatatatatatgtatatatcattatatatttaacttttcccactcaatgtattatgaacgtttcctctcaacattcaagtttcatataacacaatatcaattgctgcataatgtatcatcaaatcagtatgctataacgtatttaacctgtcctctatttctttaaagttgtttccagattttcttgttataaacaaagttgcaaggaacatcctcgtgtttacatttctcatggtttctctgattacttcatgctaaatcttagaatttgaactatgtggtcaacgcactaaaattaaaaatgcactaaaactgaaaacacctaggataatacctagaaaaaatagtgcaccataaatatttgttcaatgaataaataaaacaaagttatagttccaatagcttataagataaagtttatcttctacttcatgtaatacttaaaaaattcttagtcattttgagttctgcttatgtaaatgaactgtatcattgctcttctctgagaattttgactgactttgaaaatctccctggatgccgggcgaggtggctcacgcctgtaatcccagcacttcgggaggccgagatgggcagatcacgaggtcaggagattgagatcatcctggctaacatggtgaaaccccgtctctattaaaaaaaaaatacaaaaaattagccgggcgtggtggcaggcgcctgtagccccagctactcgggaggctgagacgggagaatggtgtgaacctgggaggcggagcctgcagtgagctgagatcgcgccactgcgatccagcctgggcgacagagagagactctgtctcaaaaaaaaaaaagaaaaagaaaatctccctggagtgttttcagtaaaattcaaatggatgtcaagtccctttgggattctaccaaatactggtttgaaaggaagcttcaaaattatataagacgttctagattcaaactaaacttaaaatgaatatctgccgggcgtgatggctcatgcctgtaatcccaccactttgggaggctgaggtaggtggatcacctgaggtcaagcgttcgagatcagcctggccaacatggtgaaaccctgtctctactaaaaatacaaaattagccgggcgtagtggcactgtcatgtagtcctagctacttgggaggctgaggcaagagactcgcttgaacccgggagacggaggttgcagtgagctgagatcgcaccattgcactccagcctgggtgacaagaatgaaactctgtctcaaaaaaagaaaaaagaatatccagagtaatcttcagtggattcacaaaacaaccaaatttgtgggaacagatgtgtatttttcccaaactctgaggaacatccaataagtaatgctataatgtttgaaagggtctagtaacttactttgaactagatttttactagggttttctttggttaccccaacatacctatgctttttttgaatcagcatgtagtctgcaccttacatttttaaatgggtataaatatatctgtattgtgtactatatgttttcatcttgtatttctaggagattgtaaaatcaggaagtatatctaagtcacctccagtagccgtaactctaccttgtccagtaaaag

SEQ ID NO: 1502 - DNA, 440 bp, Homo sapiens
  full length sequence of bloodCirc_10135
ctcctcaagagttactgatctatgaaatggcagagaatggaaaaaattgtgaccagagacgtgtagcaatgaacaaggaacatcataatggaaatttcacagacccctcttcagtgaatgaaaagaagaggagggagcgggaagaaaggcagaatattgtcctgtggagacagccgctcattaccttgcagtatttttctctggaaatccttgtaatcttgaaggaatggacctcaaaattatggcatcgtcaaagcattgtggtgtcttttttactgctgcttgctgtgcttatagctacgtattatgttgaaggagtgcatcaacagtatgtgcaacgtatagagaaacagtttcttttgtatgcctactggataggcttaggaattttgtcttctgttgggcttggaacagggctgcacacctttctgctttatctg

SEQ ID NO: 1503 - DNA, 102 bp, Homo sapiens
  full length sequence of bloodCirc_11374
ggtaaaaaagatacagtaaagacataaataccacatttgacaaatggaaaaaaaggagtgtccagaaaagagtagcagcagtgaggaagagctgccgagacg

SEQ ID NO: 1504 - DNA, 242 bp, Homo sapiens
  full length sequence of bloodCirc_18196
gcaatgaatcgctccctggctaatgtgattcttggaggctatggcaccacttcaacagctggtggaaaacccatggaaatttctggcacacatacggaaatcaaccttgacaatgcaattgacatgattcgagaagctaatagcattattattacaccaggctatggtctctgtgcagccaaagctcaataccccattgctgatttggtaaagatgctcactgagcaaggcaaaaaagtcag

SEQ ID NO: 1505 - DNA, 151 bp, Homo sapiens
  full length sequence of bloodCirc_12283
ggagctcaaagaggcccatgaagcagaactcagtgagttggagaacaactacaaagcagccttgaaggcagagaagttggctgcccaagagaagctagaggagatgggaaaagaatacaagtatttgaagaatatgtttcgtacgtatcag

SEQ ID NO: 1506 - DNA, 242 bp, Homo sapiens
  full length sequence of bloodCirc_01405
agtcatcctttttgaacttccatgactcagactgcgaacccaagggatcatcaccctgtgactccttgctttccctcaacactgagaagattctgagccaggccaagtctattgcagaacagaagagattcccgtttgccactgataatgacagcacaaatgaagagttagctattgcttatgtcttgattggcagtggtctgtatgatgaagcaatacggcatttttcaacaatgcttcag

SEQ ID NO: 1507 - DNA, 430 bp, Homo sapiens
  full length sequence of bloodCirc_03492
atatggagtttggacctccaacagttaatgataaactaatgagattttttgatcactgtgagaagtttttaactgaagtagaaaaaaatgctacagctctttatcacgtggaagccttcaaaactggaccagaaatgcagaacattttaaaaaaagttgcagctactttgcaagtgccagtaaatgatttaaatgcagatttaattcaagtagcctttttcacctgttcatttgacctggcaattaaaggtgttaaatctccttggtgtgatgtttttgacatagatgatgcaaaggtattagaatatttaaatgatctgaaacaatattggaaaagaggatatgggtatactattaacagtcgatccagctgcaccttgtttcaggatatctttcagcacttggacaaagcagttgaacagaaacaaag

SEQ ID NO: 1508 - DNA, 241 bp, Homo sapiens
  full length sequence of bloodCirc_03880
ttcagcggaccaggagaggagaaattgaaacatgctgctgctaccttttgcagtaaccaacctttcgccctggaaatgatcaaatctcgtcagaaaaaggattctcgatttcagacttttgtgcaagatgctgaaagtaatccactgtgtcgtcgtcttcaactgaaggatattattcccactcaaatgcaaaggcttactaagtacccacttctgttggataatattgccaaatacacag

SEQ ID NO: 1509 - DNA, 632 bp, Homo sapiens
  full length sequence of bloodCirc_15092
agttttccgtctgatgaaggttggccatttgcaaagtatcttggagcttgtggaagaatggtggctgtaaattatgttggagaagaactgtggagttactttaatgcgccatgggaaaaacgagttgacctcgcttggcaattaatggaaatagcagaacagcttacaaacaatgactttgaatttgcactctacctcctggacgtcagctttgacaattttgcagttggtcctagagatgggaaggtaatcattgtggatgctgaaaatgttttggttgctgacaaaagattaattagacaaaataaacctgaaaattgggatgtatggtatgaaagcaagtttgatgactgtgataaggaggcttgcttatcattttcaaaagaaattctttgtgctcgtgccactgtggaccacaattactatgctgtttgtcagaacctcttatccagacatgccacctggcgtggcacttctggaggactccttcatgatccaccaagtgaaattgccaaagatggccggctcgaggccttgctggatgagtgtgccaacccaaagaagcgctatggcagattccaggctgcaaaagaactgcgtgaatacctagcacaattaagtaacaacgtgag

SEQ ID NO: 1510 - DNA, 506 bp, Homo sapiens
  full length sequence of bloodCirc_14257
gatgatagtgatcttcctaaaacatcttctggaaggaggagagtccatgatgggaaaaaaagcatcagagctacgaactatgttgaaagcaactggaagaaacagtgtaaggaactagtgaacttaatttttcagtgtgaagattctgaaccatttagacaacctgttgatttggttgaatatccagactacagagatattatagataccccaatggattttggaacagtaagggaaactctagatgcgggaaattatgacagccctttggagttttgcaaagacatccggctgatatttagcaatgcaaaagcgtatacaccaaacaaaagatcaaagatttatagtatgaccttgagattatctgccttatttgaagaaaaaatgaagaaaatctcttctgattttaaaattggtcaaaaattcaatgaaaaacttcgaagaagccagaggttcaagcaacggcaaaattgtaaaggtgacagtcagcctaacaaaagtatcag

SEQ ID NO: 1511 - DNA, 345 bp, Homo sapiens
  full length sequence of bloodCirc_01241
aatcctgaggttggcttgaagcctgtgtggtatagtcccaaagttttcattgaaggtgctgatgcagagactttttcggagggtgagatggttacatttataaattggggcaacctcaacattacaaaaatacacaaaaatgcagatggaaaaatcatatctcttgatgcaaagttgaatttggaaaacaaagactacaagaaaaccactaaggtcacttggcttgcagagactacacatgctcttcctattccagtaatctgtgtcacttatgagcacttgatcacaaagccagtgctaggaaaagacgaggactttaagcagtatgtcaacaagaacagtaag

SEQ ID NO: 1512 - DNA, 653 bp, Homo sapiens
  full length sequence of bloodCirc_20408
caatgcagcaagtcttggaaaaccttacggagctgccctcgtctactggagcagaagaaatagacctaattttcctcaagggaattatggagaatcctattgtaaaatcacttgctaaggctcatgagaggctagaagattccaaactagaagctgtcagtgacaataacttggaattagtcaatgaaattcttgaagacatcactcctctaataaatgtggatgaaaatgtggcagaattggttggtatactcaaagaacctcacttccagtcactgttggaggcccatgatattgtggcatcaaagtgttatgattcacctccatcaagcccagaaatgaataattcttctatcaataatcagttattaccagtagatgccattcgtattcttggtattcacaaaagagctggggaaccactgggtgtgacatttagggttgaaaataatgatctggtaattgcccgaatcctccatgggggaatgatagatcgacaaggtctacttcatgtgggagatataattaaagaagtcaatggccatgaggttggaaataatccaaaggaattacaagaattactgaaaaatattagtggaagtgtcaccctaaaaatcttaccaagttatagagataccattactcctcaacag

SEQ ID NO: 1513 - DNA, 429 bp, Homo sapiens
  full length sequence of bloodCirc_18316
ctatcattgttaattatgcaagtaaaatgtttaaccgctgaactcagtcaatggcagaaaaaaacacctgaaacaattcccttgactgaagacgttctcataacattaggaaaagaagagttccaaaagctgagacaagatcttgaaatggtactgtccactaaggagtcaaagaatgaaaagttaaaggaagacttagaaagggaacaacggtggttggatgaacagcaacagataatggaatctcttaatgtactacacagtgaattgaaaaataaggttgaaacattttctgaatcaagaatctttaatgaactgaaaactaaaatgcttaatataaaagaatataaggagaaactcttgagtaccttgggcgagtttctagaagaccattttcctctgcctgatagaagtgttaaaaagaaaaag

SEQ ID NO: 1514 - DNA, 422 bp, Homo sapiens
  full length sequence of bloodCirc_20268
tgaacttgaagatgatttacttggagaagatttgctatctggcaaaaaggtaagaagtttatgtccttctgagatgaaatactagtcatttaattatacttaacatacagcagtaatcacttatacatgggtttcattactggaaagttgggtatagattaaaattttgtaaactgaattattttttaagtgcgcagggaattgactgtttattagtaaattctctggtaattataactcaagaaataaatccttgaagattagttcctactttgtccaaggcactctggcagttactggattgtgacagcgttaacatagagttattccttgccataacagaaagtcacatttggaggtgaatattttgcatacttgttctggatttcactttttggaggcattcagagataagcttaaag

SEQ ID NO: 1515 - DNA, 488 bp, Homo sapiens
  full length sequence of bloodCirc_02266
gtggacactatatagcctactgccgaaacaatctaaataatctctggtatgaatttgatgatcagagtgtcactgaagtttcagaatctactgtacaaaatgcagaagcttacgttcttttctataggaagagcagcgaagaggcacaaaaagagaggagaaggatatcaaatttattgaacataatggaaccaagcctccttcagttttatatttctcgacagtggcttaataaatttaagacctttgccgaacctggccctatttcaaataatgactttctttgtattcatggaggtgttcctccaagaaaagctggttatattgaagacctggttttgatgctgcctcagaacatttgggataacctatatagcaggtatggtggaggaccagctgtcaaccatctgtacatttgtcatacttgccaaattgaggcggagaaaattgaaaaaagaagaaaaactgaattggaaatttttattcgg

SEQ ID NO: 1516 - DNA, 567 bp, Homo sapiens
  full length sequence of bloodCirc_05793
gtggttgaacagggtatgtttgtaaagcactgcaaagtagaagtatatctcacagaattgaagctatgtgaaaatggaaacatgaataatgttgtaactcgaagatttagcaaagctgacacaatagatacaattgaaaaggaaataagaaaaatcttcagtattccagatgaaaaggagaccagattgtggaacaaatacatgagtaacacatttgaaccactgaataaaccagacagcaccattcaggatgctggtttataccaaggacaggtattagtgatagaacagaaaaatgaagatggaacatggccaaggggtccttctactcctaagtccccaggtgcatccaatttttcaactttaccaaagatctctccttcatctctatcaaataattataacaacatgaacaacagaaatgtgaaaaactcaaattactgtcttccatcatataccgcttataagaactatgattattcggaacctggaagaaacaatgaacagccaggcctctgtggcctaagtaacttgggaaatacgtgtttcatgaactcagctattcag

SEQ ID NO: 1517 - DNA, 7173 bp, Homo sapiens
  full length sequence of bloodCirc_05179
gctgaactcacgggaatcaaatggcgtaggtacaattttggagggcatggggactgtggacccataatttcagccccagcccaagatgatccaattctgttaagtttcatccgctgtctgcaagctaacctgctttgtgtatggcgtcgtgatgtcaaaccagattgcaaagagttatggatattctggtggggagatgaacccaacctagtgggtgtaatacatcatgaactgcagggtaaggtttctgtttttttcttaaaaattatttgcatcatatttttttgaacattgataaatttcaaacagattattaagacttgtctaaaagaacgatcttaagtgtttcatggatgtctctctcaaaaggaacattctcacccctcttcctcccatccctgtttttttttcctaactcttgtccttttccagttatgctgagaatcagaaccttgtgaaccgctgctgttaaatgagagtattgtgtctcctgggtgcggtggggtggaaaccaggctaagatccactgtttttaaatgatagtgaattgtgagtaactaacaagacagtgaattgaacagttactgtttttttccttggactgtggttgttatggttcactgccagctgaactctttggtggaaaattggagagtgatacagaaatttagttttgagcctaattggacaaaattgtgagattacattgaatagtattttgaggaaagatgaatatatgggatctggtctgaattgggtgtagcaaattttcttttgcttttatttctgtttttcatgtaatttggtgattccaggaaacattggctccggtgttgcctgatttttagcttcagattgcatctgatatctggaaactgaattaatgtaagagtttcatttttctgtgctgctttatatatttaccacagttttatgagcaggaacttttatcagttgtctttgaatttctggtaaaaatttttacctttttatctaagtgtttctatttagtatgcaaagggattttctcaagcaagactaattctaatctttagttagggtattaactctttttgacttagtctcttagaaccatcttttattatctccaaactatattgtgttaatctgtgtctgaaaaatttcagatcgtgtttgaaatgttttgttacttgatgtttttaatgttttttttttttaaaggaaggagtaaaactaactgtaatgtatgttcgaggctctgttctaaagcttttacatttgcctgaaggatttcctgccaacttttgcttgacaccttgctagtttttcttggcagccattttttatctgtgatatctcctgccacagcagccagagggcggtaaaccacaatggactaattgaactgtttactttatggtccatttgtctgttcagctcaaacctttatcctgatattttttagggtatttggtctataaataagagaaccattgtgggtgacattgcttgcttagctgggtaatcagcaaagtcccagaacttaacattcatctcaaagcctgttctatgtagttagcagttaacttaggtaaaattagagtttcagaacatctggattctgtttatcagaattttaaaaataagatgtcacctagaagataattacaacatttttgtttgtccattaaaatatgaaaacatatttttactttttttccctatgtagtagagaggtataaagctttttaaaaagtgtctttcttatctttcatgattgtttctgactgtcatcttctgtttctctgtattaatctcttacgttttagctttttggtctgctctttgttagtgtggtacatataattttgtaatgatgaggaaaccaaacccaactgctaatgagggttatttagttgataatatagaataaatttatttatctatgccaacggagaaaatcgtcagtgttcttagaaatagcttattaaattattgtgttatttttcatgggctttgttactgagttaacaaaaaggagtagggcatttaaattttgggatagttgctttagattgcatgtgtaaattaatatcttaagtattttttggtaaagagttaagcaaagattgaattatttttagatatttttaaaattacagaaacactacatttaagttagaaaattaggaaaacagtcatcatatggagagaacaaagaaataaaaatactgaagtctgaaagagttttagatgttttatgtgtaaatgaaattggtaccatacagtttttctaattttctaattaaatgtagtattgtgaatattttctcttgggaatgattacttttctttggagtttgatagtggtataaactgtttatattttgtattctatcaggaaagtattacagtaatggaataattataatttcattgagtgcgtctcctctttttaatatgaattttgagcaagtttttagattcatttatatgaagtgtccatttttgtaggtaaaagtagttgaaaaaggtaatgtatggttcaacctaataacagaaaatatctagccttaattagaaaaataagtcataaagacaactttgtttcaaataaggggaaatacgatagcagtcatgaaaaactgaaggatacaaagagaatattttaattggtagccatacaaagtggagatattttagaatctatttcattctctaatatatttgagtcattttattttgggtaaaataaattataggcggagcatggtggctcacgctggttatcccaacactttgggaggctgagggggcccaaatgcttgaggccaggaatttgagaccagcctgaccaatatggtgaaaccctgtgtttacaaaaaataaaaaaaaaaaattagccaggtgtggtgacgtgcacctgtaattccaactactcgggtgactggggctggaggatcacttaaacccaggaggccaaggttgcagtgagcagagataatgccactgcactccatcctgggcaacaaagtgacacctgtctcaaaaaataaaataaataaatagtagcagaatccttttagcaggctttaatgttaagcatgagattaccattatttgtaacattttttaaatagggacattttactgtttcttacattgctgcttatttatgttatttggcatttcctggctggtcacggtggctcacgcctgtaatccctgcactttgggaggcctaggcaggaggatcacctgagttcaggagttggagaccagcctggccaacatagtgaaaccccctctctagtaaaaataaacaaaaattagctgggcatggtggtgggtgcctgtaatcccagctactggagaggctgagacaggacagtcgctggaaaccgggaggcagaggttacagtgggctgagatcacgccacagcactctgctgggcaacacagcaagactccatctcaataaataaataaataaataaataaataaatagcagaatcctgttagctggcttaaattaagcatgacattaccattatttaacattttttttaatagaggcattttattgtttcttaaattgctttttagttatttggcatttccctttgtcttcatagcgtactccaaatagcgtcctaccaagaaacctcacggtgagatgtaataccaaagcaaccatcttgcatttaaatgtataaagtatcccataaaatgagaataatcctacagggtacacacacaagttagttttatgatattatactttttgtttaattgcttgacatatctctgaaatagtctgagagaaggctataacacatttataatctgtccttgtcacttggataaacacttgggttcctgtctggggaattgttaatgcgtgtggtgtagtgattcagagcacgggctctgggttgcttgggtttgaatgcttgcatagtcactagctgtgtattcttgatctaattatttaacttaaactgtgcctcagttttctcactgtgaattaggttatgaggttaagaaaaattaaaagtacttagagcagcatatatagcagttaatctataattgtaactattgctactgctactgtgcaaagacctacaggctgcgaatgaattgtggcaagaacaggttacctggggcttagggtaggagtgaaatagtctcccctctaaaaggctgagtaggtgggtcatagtatggagtacacagaaccaaggataagacatttagacttaatttgatagattttgaggaattaaacatttctgatcaggaaagcgatataattaggaagattaacttagtaataatacaggattaatgtgtacagggaaaccataatattgtgattttaaaattctaaattggaatataaacttaaatattctgttcaggatacagatgtatttaaattaaaaatactaatgattatatactataattcatattaatagtctttaacacttttattatacctttgctgttttggcttgactaaattctacattttaatttaagttttagagattaatacagtgtgctgagtggacttctcctaatctaccaaacaaatacttcttacttttttttttttttttttttcctttagacagagtcttgctctgttgcccaggctggagtgcagtgatgcaatcttggctcactgcaacctctgcctcccgggttcaaatgattctcctgcctcagccttctgagtagctgggattgcaggtgtatgccaccacacctggccaatttttgtatttttagtagagatggggtttcaccatgttggccaggttgatctcaaactcccaacctcaatcgatccgcccgcctcggcctcccaaagtgctgggattacaggcgtgagccactgggcctggcaacaaatgctttttaaataaacacaatattctcgccaattcactgcctgttagttagtggtgggaaagacatgcaatctggaaaacccaaaatagtacagagagcaagcacagaactgccaattgcttgccccaaagcattacaaatctctggtccagaaggagaagtatcagattcagcctagtatgtgcttaagaatgtttgtcgaatcagttaatgaaacgtattttatgaggttctaatgtagcgcagtattgcactcccggcagattgacttataataaatttgtgaaaatttttaatgatttgataatgcgaggatattgaagcctagttaaaataaagcatattatttctggttttaattcccaaggggatagaaatagccaatttttggggtatattttctaccacaaatatttagcactaaatatgcactgtctacaattttaaaatttatgttgtctctttttttgattattagacatataaattaaggatacatctgtacaactctaaaaatgattgtccctataacagtatcagaagtcttctgaattggttttattgtcagtgcaggggtagattggcagttattaccctttgttgtgaatttagagacataaatattgctttttctatttttaagagtgctgccacctgtgccaggaggtgtgggcgattgtaaaaacattagacataagagagcctggaaaaatggatctgttttctgacagtgaccacggtgtaagataatttaagatactagtactattgtttattgaactcattgcaagtgggcattttgtaggagtgtgggaaggctggatttttttagttttgtaatctgtatctatagattacagtctacaattccaaatggtgggattgataaaacctttgtttagataactccaagcaagaacctagcttctccactcctcctagctttttatttttaaatatatttacacacttatatgcatatgcctctttttccacctaaactatttgaggcaattttcagacttcacggacctttgcccctaaatacttcagcatttaagtcctgtgaatgagaatgtgaagcactcttttacgtaaccagagcacttttggcatgctcaagaaatttaatatcgatataattaaattatctaatatttagtccatattcaaatttcccaattgtcttagcaataccttttatagttttctctctctctgatccagaatgcaatcaggatcacacatttttagatggcttgtgtcctctcatttagaatattcctgaagttgtcttggggatcaatgatattgatgttatttgaagggagcagtttagttgtcctgtaaaatatcccacattttgaatttgtctaattgttttcttacagttagagtcaggataaacatatttggcaagaatactgagtaggtgatgttgtgtcctttccacggcatcacatcagaaacaggtcatgtcagtttgtctcaatattgatggtactgagcttgatcccttgattaaggtagtgtctgccagatttctccagtgtaaagatatcctttccttttgtaattgttaagtaaatttgggatgaaactttgagattgtgtgaatatctctttcctcaaaagagcctaattttgagcctgtttaaaccaaccgaaaaattccggaatcacctgcttttagaaaatcagttgagatcacatgaagactgcatttttaagtcacagcagagttcaagaggagaagagaataaaatattgaagatctaccaaaggcaaattataatggcaatgtcacactatgaaaatgaatagcccctattgcttagcatacctaaaaagagaagtgttgacattgaattttccaaaatcatagacaataatgtatgtaggaatatattactgtgtatcttagagtctgtgaactttcaattgatttttgatggtttctggttatccttaactaaatggtaaaaataatttcatcggtattatacatgaatttattatcagttgaaattaaaaaattgctttctggaaaagtaatgactattttatatataaattgacaggaataagattatctcttgtcattttgaaaatttctttcaaggagaaaatctgatctttgactcattttcactctgtttttctatctttttttttagtggtattaaatttgtgagtcattgaaattaatccctgactgaattggaaaggaattgtatttgcagtatttggatttatttatttttcag

SEQ ID NO: 1518 - DNA, 7273 bp, Homo sapiens
  full length sequence of bloodCirc_05174
gctgaactcacgggaatcaaatggcgtaggtacaattttggagggcatggggactgtggacccataatttcagccccagcccaagatgatccaattctgttaagtttcatccgctgtctgcaagctaacctgctttgtgtatggcgtcgtgatgtcaaaccagattgcaaagagttatggatattctggtggggagatgaacccaacctagtgggtgtaatacatcatgaactgcagggtaaggtttctgtttttttcttaaaaattatttgcatcatatttttttgaacattgataaatttcaaacagattattaagacttgtctaaaagaacgatcttaagtgtttcatggatgtctctctcaaaaggaacattctcacccctcttcctcccatccctgtttttttttcctaactcttgtccttttccagttatgctgagaatcagaaccttgtgaaccgctgctgttaaatgagagtattgtgtctcctgggtgcggtggggtggaaaccaggctaagatccactgtttttaaatgatagtgaattgtgagtaactaacaagacagtgaattgaacagttactgtttttttccttggactgtggttgttatggttcactgccagctgaactctttggtggaaaattggagagtgatacagaaatttagttttgagcctaattggacaaaattgtgagattacattgaatagtattttgaggaaagatgaatatatgggatctggtctgaattgggtgtagcaaattttcttttgcttttatttctgtttttcatgtaatttggtgattccaggaaacattggctccggtgttgcctgatttttagcttcagattgcatctgatatctggaaactgaattaatgtaagagtttcatttttctgtgctgctttatatatttaccacagttttatgagcaggaacttttatcagttgtctttgaatttctggtaaaaatttttacctttttatctaagtgtttctatttagtatgcaaagggattttctcaagcaagactaattctaatctttagttagggtattaactctttttgacttagtctcttagaaccatcttttattatctccaaactatattgtgttaatctgtgtctgaaaaatttcagatcgtgtttgaaatgttttgttacttgatgtttttaatgttttttttttttaaaggaaggagtaaaactaactgtaatgtatgttcgaggctctgttctaaagcttttacatttgcctgaaggatttcctgccaacttttgcttgacaccttgctagtttttcttggcagccattttttatctgtgatatctcctgccacagcagccagagggcggtaaaccacaatggactaattgaactgtttactttatggtccatttgtctgttcagctcaaacctttatcctgatattttttagggtatttggtctataaataagagaaccattgtgggtgacattgcttgcttagctgggtaatcagcaaagtcccagaacttaacattcatctcaaagcctgttctatgtagttagcagttaacttaggtaaaattagagtttcagaacatctggattctgtttatcagaattttaaaaataagatgtcacctagaagataattacaacatttttgtttgtccattaaaatatgaaaacatatttttactttttttccctatgtagtagagaggtataaagctttttaaaaagtgtctttcttatctttcatgattgtttctgactgtcatcttctgtttctctgtattaatctcttacgttttagctttttggtctgctctttgttagtgtggtacatataattttgtaatgatgaggaaaccaaacccaactgctaatgagggttatttagttgataatatagaataaatttatttatctatgccaacggagaaaatcgtcagtgttcttagaaatagcttattaaattattgtgttatttttcatgggctttgttactgagttaacaaaaaggagtagggcatttaaattttgggatagttgctttagattgcatgtgtaaattaatatcttaagtattttttggtaaagagttaagcaaagattgaattatttttagatatttttaaaattacagaaacactacatttaagttagaaaattaggaaaacagtcatcatatggagagaacaaagaaataaaaatactgaagtctgaaagagttttagatgttttatgtgtaaatgaaattggtaccatacagtttttctaattttctaattaaatgtagtattgtgaatattttctcttgggaatgattacttttctttggagtttgatagtggtataaactgtttatattttgtattctatcaggaaagtattacagtaatggaataattataatttcattgagtgcgtctcctctttttaatatgaattttgagcaagtttttagattcatttatatgaagtgtccatttttgtaggtaaaagtagttgaaaaaggtaatgtatggttcaacctaataacagaaaatatctagccttaattagaaaaataagtcataaagacaactttgtttcaaataaggggaaatacgatagcagtcatgaaaaactgaaggatacaaagagaatattttaattggtagccatacaaagtggagatattttagaatctatttcattctctaatatatttgagtcattttattttgggtaaaataaattataggcggagcatggtggctcacgctggttatcccaacactttgggaggctgagggggcccaaatgcttgaggccaggaatttgagaccagcctgaccaatatggtgaaaccctgtgtttacaaaaaataaaaaaaaaaaattagccaggtgtggtgacgtgcacctgtaattccaactactcgggtgactggggctggaggatcacttaaacccaggaggccaaggttgcagtgagcagagataatgccactgcactccatcctgggcaacaaagtgacacctgtctcaaaaaataaaataaataaatagtagcagaatccttttagcaggctttaatgttaagcatgagattaccattatttgtaacattttttaaatagggacattttactgtttcttacattgctgcttatttatgttatttggcatttcctggctggtcacggtggctcacgcctgtaatccctgcactttgggaggcctaggcaggaggatcacctgagttcaggagttggagaccagcctggccaacatagtgaaaccccctctctagtaaaaataaacaaaaattagctgggcatggtggtgggtgcctgtaatcccagctactggagaggctgagacaggacagtcgctggaaaccgggaggcagaggttacagtgggctgagatcacgccacagcactctgctgggcaacacagcaagactccatctcaataaataaataaataaataaataaataaatagcagaatcctgttagctggcttaaattaagcatgacattaccattatttaacattttttttaatagaggcattttattgtttcttaaattgctttttagttatttggcatttccctttgtcttcatagcgtactccaaatagcgtcctaccaagaaacctcacggtgagatgtaataccaaagcaaccatcttgcatttaaatgtataaagtatcccataaaatgagaataatcctacagggtacacacacaagttagttttatgatattatactttttgtttaattgcttgacatatctctgaaatagtctgagagaaggctataacacatttataatctgtccttgtcacttggataaacacttgggttcctgtctggggaattgttaatgcgtgtggtgtagtgattcagagcacgggctctgggttgcttgggtttgaatgcttgcatagtcactagctgtgtattcttgatctaattatttaacttaaactgtgcctcagttttctcactgtgaattaggttatgaggttaagaaaaattaaaagtacttagagcagcatatatagcagttaatctataattgtaactattgctactgctactgtgcaaagacctacaggctgcgaatgaattgtggcaagaacaggttacctggggcttagggtaggagtgaaatagtctcccctctaaaaggctgagtaggtgggtcatagtatggagtacacagaaccaaggataagacatttagacttaatttgatagattttgaggaattaaacatttctgatcaggaaagcgatataattaggaagattaacttagtaataatacaggattaatgtgtacagggaaaccataatattgtgattttaaaattctaaattggaatataaacttaaatattctgttcaggatacagatgtatttaaattaaaaatactaatgattatatactataattcatattaatagtctttaacacttttattatacctttgctgttttggcttgactaaattctacattttaatttaagttttagagattaatacagtgtgctgagtggacttctcctaatctaccaaacaaatacttcttacttttttttttttttttttttcctttagacagagtcttgctctgttgcccaggctggagtgcagtgatgcaatcttggctcactgcaacctctgcctcccgggttcaaatgattctcctgcctcagccttctgagtagctgggattgcaggtgtatgccaccacacctggccaatttttgtatttttagtagagatggggtttcaccatgttggccaggttgatctcaaactcccaacctcaatcgatccgcccgcctcggcctcccaaagtgctgggattacaggcgtgagccactgggcctggcaacaaatgctttttaaataaacacaatattctcgccaattcactgcctgttagttagtggtgggaaagacatgcaatctggaaaacccaaaatagtacagagagcaagcacagaactgccaattgcttgccccaaagcattacaaatctctggtccagaaggagaagtatcagattcagcctagtatgtgcttaagaatgtttgtcgaatcagttaatgaaacgtattttatgaggttctaatgtagcgcagtattgcactcccggcagattgacttataataaatttgtgaaaatttttaatgatttgataatgcgaggatattgaagcctagttaaaataaagcatattatttctggttttaattcccaaggggatagaaatagccaatttttggggtatattttctaccacaaatatttagcactaaatatgcactgtctacaattttaaaatttatgttgtctctttttttgattattagacatataaattaaggatacatctgtacaactctaaaaatgattgtccctataacagtatcagaagtcttctgaattggttttattgtcagtgcaggggtagattggcagttattaccctttgttgtgaatttagagacataaatattgctttttctatttttaagagtgctgccacctgtgccaggaggtgtgggcgattgtaaaaacattagacataagagagcctggaaaaatggatctgttttctgacagtgaccacggtgtaagataatttaagatactagtactattgtttattgaactcattgcaagtgggcattttgtaggagtgtgggaaggctggatttttttagttttgtaatctgtatctatagattacagtctacaattccaaatggtgggattgataaaacctttgtttagataactccaagcaagaacctagcttctccactcctcctagctttttatttttaaatatatttacacacttatatgcatatgcctctttttccacctaaactatttgaggcaattttcagacttcacggacctttgcccctaaatacttcagcatttaagtcctgtgaatgagaatgtgaagcactcttttacgtaaccagagcacttttggcatgctcaagaaatttaatatcgatataattaaattatctaatatttagtccatattcaaatttcccaattgtcttagcaataccttttatagttttctctctctctgatccagaatgcaatcaggatcacacatttttagatggcttgtgtcctctcatttagaatattcctgaagttgtcttggggatcaatgatattgatgttatttgaagggagcagtttagttgtcctgtaaaatatcccacattttgaatttgtctaattgttttcttacagttagagtcaggataaacatatttggcaagaatactgagtaggtgatgttgtgtcctttccacggcatcacatcagaaacaggtcatgtcagtttgtctcaatattgatggtactgagcttgatcccttgattaaggtagtgtctgccagatttctccagtgtaaagatatcctttccttttgtaattgttaagtaaatttgggatgaaactttgagattgtgtgaatatctctttcctcaaaagagcctaattttgagcctgtttaaaccaaccgaaaaattccggaatcacctgcttttagaaaatcagttgagatcacatgaagactgcatttttaagtcacagcagagttcaagaggagaagagaataaaatattgaagatctaccaaaggcaaattataatggcaatgtcacactatgaaaatgaatagcccctattgcttagcatacctaaaaagagaagtgttgacattgaattttccaaaatcatagacaataatgtatgtaggaatatattactgtgtatcttagagtctgtgaactttcaattgatttttgatggtttctggttatccttaactaaatggtaaaaataatttcatcggtattatacatgaatttattatcagttgaaattaaaaaattgctttctggaaaagtaatgactattttatatataaattgacaggaataagattatctcttgtcattttgaaaatttctttcaaggagaaaatctgatctttgactcattttcactctgtttttctatctttttttttagtggtattaaatttgtgagtcattgaaattaatccctgactgaattggaaaggaattgtatttgcagtatttggatttatttatttttcaggtatggaattctggtgattttgaaaacatgaatgataccattttgcagcagcattgtagatttgtagtattttagattggtatcacagtgcacctgaaaa

SEQ ID NO: 1519 - DNA, 695 bp, Homo sapiens
  full length sequence of bloodCirc_22708
attatctgcaattatgaaatgaagtaactcaagatgagcaagttaaaagtgataccagaaaaaagccttaccaataattctaggatcgtaggactcctggctcaactggagaagatcaatgctgagccttcagaatcagacactgcccgatatgttacatcaaaaattcttcatctggctcagagtcaagaaaaaacaaggagagaaatgacagccaaaggttctacaggaatggaaattctgctgtcaacattagagaacacaaaagatcttcaaactacacttaatatcttaagcattcttgttgagctggtgtcagctggtggaggtcgaagagtgagtttcttagtcaccaaaggtggttcacaaatattgttgcagttacttatgaatgccagcaaagaatctcccccacatgaggacttaatggtacagattcattctattcttgcaaagattggaccaaaagataaaaaatttggagtaaaggctagaattaatggggctctgaatataaccctgaatttggtcaagcagaatttgcagaatcatcgcttggttctaccttgccttcagcttttacgagtatattctgccaactctgtgaattcagtatccttagggaaaaatggagttgtggaactgatgtttaaaatcattggaccatttagtaagaagaattccagtcttataaa

SEQ ID NO: 1520 - DNA, 383 bp, Homo sapiens
  full length sequence of bloodCirc_20391
agttaatagagtggatacaaccttgctgaagatgaagaatatacaatattgaggatatttttttcttttttttttcaagtcttgatttgtggcttacctcaagttaccatttttcagtcaagtctgtttgtttgcttcttcagaaatgttttttacaatctcaagaaaaaatatgtcccagaaattgagtttactgttgcttgtatttggactcatttggggattgatgttactgcactatacttttcaacaaccaagacatcaaagcagtgtcaagttacgtgagcaaatactagacttaagcaaaagatatgttaaagctctagcagaggaaaataagaacacagtggatgtcgagaacggtgcttctatggcaggatatg

SEQ ID NO: 1521 - DNA, 258 bp, Homo sapiens
  full length sequence of bloodCirc_11362
gagtgggaggagcggcgcaggcagaacattgagaagatgaatgaggagatggagaagatcgccgagtatgagcgcaaccagcgggaaggggttcttgaacccaacccagtgcggaacttcctggacgacccccggcgacgcagcgggcccctggaggagtctgagcgggaccgccgggaggagagccgccggcacggccgcaactgggggggccccgacttcgagcgggtgcgctgtggccttgagcacgagcggcag

SEQ ID NO: 1522 - DNA, 6144 bp, Homo sapiens
  full length sequence of bloodCirc_15121
cagtaaaagagaactctgttcatcccacatccttgtcagcatttgatgttgtcagtgttcttcattttcaccattctaataggtatgtagtgatgtctcattgttttaatgtgcatttccttcatgacatatgatatggatgattttttcacatgcttctttgctatctgctatggtttgaatatttgtatttccctagaattttgaaacctattcaccaatatgttggtaatagaatgtggggcatttgggagatgattaggtcataagggcagggacatcacaaatggggttaatgcccctattaaagaggtcccagaaagcagccttgtttcttccaccatgttaggacacggtgagaagtcaacatgaaaaaccagaaatcgggccctcaccagaccctgaatctactggagccttgatcttgaacttcccagcccccagaactgtgagacataaattaactaacagttgtttataacccacccagtttacagtatttttgttatagcggctgaaacaaactaagacaccatctatatgtcttctttggtgagatgtattttaaggtctttggcccattttctaattgggttgttattattgttgagatttaagggttctttgtacattttggatagcagtcctttgtcagacagacatgtcttttgcaaatattttatcccagtctgtagcttgtttttaattttcttgacattatctttcacagaacagaaatttttaattttaatgaaatccactttgtcaactttcttattcatgaattgtgtcttttggtttcattatctaaaatgtcattgccaaatccaaggtcatttagactttctactgtgttaacttctatgagttttacagtttcgcatgttacatttaggcatgtgatccaatttcagttaatttttgtgaagggtgtaaagtctgtatacagattcatttctttgcacatgggtgtctagttttcccagaactattcattaaaacaaatgaccttttctttattgtattgcagtttcccctttgtcaaagatcagttgactatatttatgtgggtctatatctgggctctctattctgttccattgatatatttgtctatttactctccaataccacactgtcttattattgtagctttataccatcttaaaatcgagtagtgtcaatcaggcttgttttttaagctttgttagggtgggtctaaatcagtcttaacctatggcaaatttaatcctactactaagcctatgtacctcttactactctactgatagagtagtaagattagtagtgattttaatgaattttactacttaccgctctacctgatagagtagtaagaggtatataggcatgtatatatatatatatatatatatatatatatatatatatatatatatatatggtatataggcttagtagtgattttaatgaattttactacttactgctctgatagagtagtaagaggtctatagtcatatatatacatatatatatatgtgtgtgtgtatataggcttagtagtacctatgtactactgatgtattaacaggccttctcacactggctggtggaacaccatttatttccagctatttccagctatagacttgaggagaacctatagacttgaggagaaccttttgcaaatctccattgttctctctgtatgcaaatcctactttttgatactctactttgaaaattgctgggacctcagcctcctcaaatcttatttttgtctctttgactaagtgaaatgaccagggtctgtttgggttgtccctttttgcactgcagtctggaagatacctgggattacaggcatgagccaccatgcccaactaatttttttttttttttttgtatttttagtagagacggggattctgcatgttggtcaggctggtcttgaactcctgaccttgtaatccacccatcttggcctcccaaagtgctgggattagaggtgtgagccaccacacctggcttacttttatttttctttctatttttacacttttcttttcttctaattgcattggataacacttccagaacaataatactaatagcgatgatagtgggttatcctagtctttccatttgtttatatatctaattagtgtcacatattttggacatgagttctgaatatacacaatctactaagtaaaatggtactttcttaaaattacatttaacttttaagataaattataaaatatttgataataatacttttataatactttgtgccacatccccagcaccgctgcccctcttgttaaaaaaaaagttttatttttttctttccaaatggttactaaccacagtctataaaacagtcattctttaaccttgttctggtatttttttcctctctctctctctctgtgtgtatatataaatttagcattagagatgtaaatacaccaaattgttttataagattttctaataatgcataacttattgttgttgttaaagatattttaagaaaatgatgtataataaatagcatccatgtccttttgtgggctgcaattgatagttcaatggtcaggtaacgcttctcctggatcagttgggcccagggaatctttctgacatattctgtaacttcaggtagcctcctaagtgacctttttacttgatgtcctggattagcttcaaatatcttagatctagaataattaccattacaatgttgtaaatatttatcttggtttgaaatttagcttcatattgataactcattttatttaaatttttaaaatatgatttattttgttcattttgaaaaaagtcactaattctattacaaagaagtaaaagacaaaatcttaataaatgaaaaatttagttttggaaaaaaaccttaaaaatgtagttttattatttttaagtgcatgtagtaatctcaatagtaacaaaaaatggattaaaacttgcagtctttcaggcaactatttaataaggagatacaaataattcaactgcttttttgtaagtaggttctacgaaactgacaaatatttttccttcctaagtagtttatagttacttaaaattttgttttttaccctttcatttagcaaagtgatagttttatagcataaaaataaactttaaaacaagtctaatcttataaacagtgagaaatctgacctttacaaatgatatttctgcaaaaagaaaaagaatggaatttaatggtataaatctacaactttatatatatatatattttatatattatatatacaacattttatatattatatatatatacacataactatatatagcaacacattctatctgttgccattaagttggtatatcagtaaagattattaaaagagtttaaccccaacaagttctgacaatagtataatcattcaataaatacccactgtggtggactgagttattggcctcaattctttcctcatctcggagtccatgttcttttttttatagctttttggtgtcccttcacttgaactctgggctcagcaatgttacttcctttggccaatagagtgttagaagaattcatatagcaggtggttgaacggaacatcctaattttcattctttggccattgctataagaaaacactaagctagtcttacggaggatgaaacatatggaatagagccaacccatagataagtaagtaagctagctagacttcagacacatgattgggcatagacaaggccaacctagatcagctggaaaccagccagccctcagatgaataagtgagctatttaagatcagcagagccatctaattattgcctctgatgtatgagcaataagttcttgttttatgtcactgaggtttcttgctgcttgttatgcagcattattgtggtgataggtaactgatatatacccattaagtgaagaaatcttatttgaattatctcattgtttcacacatatacatttattgacttcctaaatagaatagagggaacttgaggtcaagatgtctgcttcttgatatcttacagctcatcatgccttaatcatcctactccatgctctggtgaattttcagcataactgtcaaacttttaaatatgtttatttcaaacacttcaaatgtattaattattattattattattttgagatggggtcttgcactgttgcccgggctggagtgcaatagtgctatcttggctcactgcaacctctgtctcccaggttcacgcgattctcctgcctcagtctccggagtagctgggattataggtgcacaccaccatacgccactaatttttttatttttagtagagatggggtttcgctatgttggccagactgacctcgaactcctgacctcttgatccaccggcctcagcctcacaaagtgctgggattacaggcctgagccaccgtgcctggcccaaatttattaaatgttatctgtttctaagtttctatctggagctatgggttcttactgcttcattgtatctttttgaataactgttttcaatgaaaaatgaaatggtatcttaacatttccatctattcaacagaaataaattgctttaaaattattcaagtaagcacctttacaactgaaactggattgatacaggaaatatattatgcccacacaagcacacagcgcatatgtatgtaaataagggcacctgtatgtgtgtatacacacacacacaaatgttaaactgaacttatatgtttttgctttcaaaaaaattgccacttttatcatttaaattattttatatgaatctttcaaccgacagacaaaattgacctttggtgaggaaatctaaccttttattttctttattttccccctcaattccaaatatgaagtctcaaaattatattaatatagattttgcatttaatatgcaataaaacaacttggtaagcattaaatggtaacagtgataagcttttaatgtagttaaatatggcaaaacaaatcaatacgtggttcttaattgattttgattgtattgtgtagacaatctcattggattacatgctcattatggaaaagaaagcaaaatcaaaataaacaaaccagtcctccagcatttctagctgtcctatccacctgcatgcatcttcttgtgtgaatattaaaggaaattaattttgcacgattgatattaatttatgtcattttcttaagaagttgttcagttatcctgaaatgtagaaataattggaaacagttctaatgtagatcaactaattataaaagactaatcatgaaagacttgtgttttcaaaattatgattcaaagacaggtagttcagtacactaagactgttgaaacacattttataactgtgccatatacagccatatttatatttccccttcatatattttgtataacataaaaagtgtaagcatcaagcaggaagggaaattttaagatattagttcaaaataatgtagtaactttgttgggctctaagacatattttcattccaaataaaagagtttttcttcccctgaaaaaacagaaatacaatcaacaaatactatctgactaatttgatatcagtgattctcagaagtacataagacaacatttcattgcagcaaaagtgaaattataaaaaaattagaaattacctgagtcattttttaattcatgatatttatgctaaaatatcgagtaggttgattattgttaggtcagtttccctactgcagagcctgaattgaggattccttgcaaatgattttttttttttgagggaatgttctcagaaggaaactgttaggaaatgacagaagccaaataaggtaggtggaaaacctaggaaaggatatgcttttaacagaagtctagactcatcctgatcccatgtggagctctagagagtttgaatggctcctaggagttgttccactgagacaaattatattttgtacttctgtgttggtcaattattggctaagggccgcctctctactccctacaggcacccctgagtgggtaggagcttccataaccacaaacacagacatctctgggagaggtgtcttcctcttgttctagccaaaactcacagcagctggggaacgattaatctggcag

SEQ ID NO: 1523 - DNA, 414 bp, Homo sapiens
  full length sequence of bloodCirc_02629
gcttttttgtccaaggttttcctaaactcttgaggtttcaagaacatcatgaaaaaatactgaacaaatttctgtccaagcttaagcaacacttggattctcaagaaatctacacaagtttttacacaatgaaatggttttttcagtgtttccttgatcgtactccctttacactaaacctcagaatatgggatatctacatctttgaaggagaacgagttcttactgctatgtcttacaccatcttaaaattacacaaaaaacatctaatgaaattgtccatggaagaacttgtagaattttttcaggagaccctggcaaaggattttttctttgaagatgattttgtgatagagcaacttcagatttctatgacagaactaaagcgggcaaagttagaccttccagaacctg

SEQ ID NO: 1524 - DNA, 232 bp, Homo sapiens
  full length sequence of bloodCirc_15583
ggcagctttggaagaagtagaaggtgatgtggcagaattggaactaaaacttgataagcttgtgaaactttgtattgcaatgattgatactggaaaagccttttgtgttgcaaataaacagttcatgaatgggattcgagacctggctcagtattctagtaatgatgctgtcgttgagacaagtttgaccaagttttctgacagtcttcaagaaatgataaattttcacaca

SEQ ID NO: 1525 - DNA, 323 bp, Homo sapiens
  full length sequence of bloodCirc_07647
tccagttacaacacagggatcacaacaaacacaaccgccacagaagcactatggcattacttctcctatcagcttagcagcccccaaggagactgactgcgtacttacacagaaactaattgagacattgaaaccctttggggtttttgaagaggaagaggaactgcagcgcaggattttaattttgggaaaactaaataacctggtaaaagagtggatacgagaaatcagtgaaagcaagaatcttccacaatctgtaattgaaaatgttggaggaaaaatttttacatttggatcttacagattaggagtgcatacaaaag

SEQ ID NO: 1526 - DNA, 587 bp, Homo sapiens
  full length sequence of bloodCirc_12697
gttttagctaaagaagatactgaggcagctattcaatcaatattatacaaagaaaattctgtaattaaggaactagataagtatttacaacatcatgccttcttaaatgcaagaagaaaggagatgttatataaaagatgggttgactgtgtggcagatcctcttcagaagaaaattatagaaaaagtttgctcacataagaagattaaaaaaaggaggcaaggggaattagatggctttttaaaacatgtaaataaaaagggaaatgcatttatagaacattatgatccaaaagagtatgatcccttttatatgagcaagaaggaccccaattttctgaaggttaccatcccaccatttcatgaccctttgaaaaaagcacaatatgacaaggataacgaaaaaagaactcttcttcagtgtgagactggcaaaatatattcaataaaggaattcaaagaagttgagaaggttcagctgcattccagattcccacaaatttctaattcaaggcactttataactccaaacgagtggctgaaactgcctacaagatacatagaaagtgaattttgtagaaggagaag

SEQ ID NO: 1527 - DNA, 1135 bp, Homo sapiens
  full length sequence of bloodCirc_09124
atcttgagccagatgattgtgcatccatttacatctttaatgtagatccacctccatctactttaaccacaccactttgcttaccacatcatggattaccgtctcactcttctgttttgtcaccatcgtttcagctccaaagtcacaaaaactatgaaggaacttgtgagattcctgaatctaaatatagcccattaggtggtcccaaaccctttgagtgcccaagtattcaaattacatctatctctcctaactgtcatcaagaattagatgcacatgaagatgacctacagataaatgacccagaacgggaatttttggaaaggccttctagagatcatctctatcttcctcttgagccatcctaccgggagtcttctcttagtcctagtcctgccagcagcatctcttctaggagttggttctctgatgcatcttcttgtgaatcgctttcacatatttatgatgatgtggactcagagttgaatgaagctgcagcccgatttacccttggatcccctctgacttctcctggtggctctccagggggctgccctggagaagaaacttggcatcaacagtatggacttggacactcattatcacccaggcaatctccttgccactctcctagatccagtgtcactgatgagaattggctgagccccaggccagcctcaggaccctcatcaaggcccacatccccctgtgggaaacggaggcactccagtgctgaagtttgttatgctgggtccctttcaccccatcactcacctgttccttcacctggtcactcccccaggggaagtgtgacagaagatacgtggctcaatgcttctgtccatggtgggtcaggccttggccctgcagtttttccatttcagtactgtgtagagactgacatccctctcaaaacaaggaaaacttctgaagatcaagctgccatactaccaggaaaattagagctgtgttcagatgaccaagggagtttatcaccagcccgggagacttcaatagatgatggccttggatctcagtatcctttaaagaaagattcatgtggtgatcagtttctttcagttccttcaccctttacctggagcaaaccaaagcctggccacacccctatatttcg

SEQ ID NO: 1528 - DNA, 184 bp, Homo sapiens
  full length sequence of bloodCirc_01967
gagagattaaacagattctagaaaatgaacttcagatacctgtgtccaaaatgctgttaaaaggctggaagacgggagatgtggaagacagtacggtcctaaaatctctacacttgccaaaaaacaacagtctttatgtccttacaccagatttgccaccaccttcatcatctagtcatgctgg

SEQ ID NO: 1529 - DNA, 247 bp, Homo sapiens
  full length sequence of bloodCirc_09438
gaggaattttgttgtcagagaataaaaggaggttgtccataattgactttaagcagcaatcagtaaaacattgagctcttcagctccgcctttcttgctctgaaaattggaaaaccaagaaggttttgatgttttgtgtgacgccacctgaattagaaaccaagatgaacataaccaaaggtggtctggtgttgttttcagcaaactcgaattcatcatgtatggagctatcaaagaaaattgcaga

SEQ ID NO: 1530 - DNA, 131 bp, Homo sapiens
  full length sequence of bloodCirc_06838
gtgagttcccagagaacggggctccgcgcgaggtcagactgggcaggagatgccgtggaccccgcccttcggggaggggcccggcggatgcctcctttgccggagcttggaacagactcacggccagcgaa

SEQ ID NO: 1531 - DNA, 819 bp, Homo sapiens
  full length sequence of bloodCirc_01695
caagagcagtatgaaagtaccatcggattcaaacttcccagttaccgagcagctaagaaattatggaaagtctgtgtagaacatcacacgtttttcagattgacatctacagacaccattcccaaaagcaaatttcttgcgctaggatccaaatttcgatacagtggccggactcaagctcagaccaggcaagctagtgctctaattgacaggcctgccccacacttcgagcgtacagcaagtaaacgggcgtcccggagcctcgatggagcagcagctgtcgattcggcagaccgaagtcctcggcccacttctgcacctgccattactcagggtcaggttgcagaaggtggcgtcctagatgcctctgctaaaaaaacagtggtccctaaagcacagaaggaaacagtgaaggctgaagtgaaaaaggaagacgagccacctgagcaagctgagccagagcccacagaagcatggaaggtggaaaaaacccacatcgaggtgacagtacccacctcaaatggtgaccaaacacagaagcttgcagaaaaaactgaagatctgataagaatgaggaagaaaaagagagaaagactagatggtgaaaacatttatatcagacatagcaatttaatgttggaggatttagacaagagtcaagaggagatcaaaaaacatcatgccagcatcagtgagctgaaaaagaacttcatggagtctgtaccagaaccacggcctagtgaatgggataaacgcttatccactcactcacccttccgaactcttaacatcaatgggcaaatccccacaggagaagga

SEQ ID NO: 1532 - DNA, 411 bp, Homo sapiens
  full length sequence of bloodCirc_06864
atctgacaggatggcatctgatgactttgacatagtgattgaggccatgctggaagctccctataaaaaagaagaggatgagcaacaaaggaaagaagttaaaaaggattatcctagcaataccaccagcagcaccagcaacagtggcaatgagaccagtggaagcagcaccatcggggagacaagcaagaagaagaggagtcggagccataataaaagcagggatagaaagcgcagtcgtagtcgagatcgggatcggtatagacggagaaatagtcggagccgaagtccaggtcggcagtgtcgtcaccgtagccgtagctgggatcgtcgacatggtagtgagtcgcgaagtcgggaccatcgtcgtgaggatcgtgtgcattacaggagtcctccacttgccactgg

SEQ ID NO: 1533 - DNA, 670 bp, Homo sapiens
  full length sequence of bloodCirc_00645
gcttcccagctggcgtgtatgttgtaaagagagttcttcagcttcagcgtcatcatattactctcaagatgacaactgcgcactagaaaatgaagatgtacaattccagaaaaaggatgaaagagagggacctatcaatgccgaatcattgggaaaatcaggttcaaatttacctatttctccaaaagaacataaattaaaagatgattctattgtggatgtacaaaatacagagtcaaaaaagttaagtccaccggtggtggagacactccctacagttgatttgcatgaagagtcttccaatgcagttgtggacagtgaaactgttgaaaatatttccagctcatctacctcagaaatcactccaatctcaaagcttgatgaaatagaaaaatctggtactattccgatagccaaaccaagtgaaactgagcagtctgaaactgattgtgatgttggtgaggcccttgatgctagtgctccaattgaacaaccttcctttgtcagtccacctgacagccttgttggccagcatatagaaaatgtatcatcttcacatggtaaaggaaagataacaaaatcagaatttgaatcaaaagtttcagcaagtgaacagggcggtggtgatccaaaatctgcattgaatgcttcagataatttaaaaaatgag

SEQ ID NO: 1534 - DNA, 350 bp, Homo sapiens
  full length sequence of bloodCirc_02169
gtgcctcatctccagacatggagcccagctatgggggaggtctctttgacatggtaaaaggaggtgcagggaggctctttagtaacctaaaggacaacttgaaagacaccctcaaagacacatcttctagagtgatacaatctgtgaccagctacacaaagggagatttagacttcacttatgttacctccagaattattgtgatgtcctttcctctggacaatgttgacataggattcaggaatcaggttgatgacattcgaagctttttggattccagacatcttgaccactacacagtatacaatctgtcacctaagtcttatcgaactgccaagtttcacagccgg

SEQ ID NO: 1535 - DNA, 209 bp, Homo sapiens
  full length sequence of bloodCirc_01429
atggtaaatttgaaagagaaaattaaagaactccatcagcaatacaaagaagcatctgaagtaaagccacccagagatattactgccgagttcttagtgaaaagcaaacacagggatctgaccgccctatgcaaggaatatgatgaattagctgaaacacaaggaaagctagaagaaaaacttcaggagttggaagcgaatcccccaag

SEQ ID NO: 1536 - DNA, 215 bp, Homo sapiens
  full length sequence of bloodCirc_22699
tggatgacgtagtagatgaaagtgatgacaacgatgatattgatgtagaagctgaaaacgaaactgagaatgaagatgacctagatcaaaattttaagaatgatgatattgaaacagatattaacaaactaaaaccccagcaagaaccgggacgaacaatagaagatctaaaaatgtatgaacaccttttccctgagcttgttgatgattttcag

SEQ ID NO: 1537 - DNA, 301 bp, Homo sapiens
  full length sequence of bloodCirc_05351
attacaggaccagataacaaaggaatttacaaaggagacagagaatccagtgggaaatacacatttgctgctcacatggatggaacatacaaattttgttttagtaaccggatgtccaccatgactccaaaaatagtgatgttcaccattgatattggggaggctccaaaaggacaagatatggaaacagaagctcaccagaacaagctagaagaaatgatcaatgagctagcagtggcgatgacagctgtaaagcacgaacaggaatacatggaagtccgggagagaatacacagagcca

SEQ ID NO: 1538 - DNA, 128 bp, Homo sapiens
  full length sequence of bloodCirc_18039
tttgtttcgacgccggaccgcgtaagagacgatgatgttgggcacggaaggtggagagggattcgtggtgaaggtccggggcttgccctggtcttgctcggccgatgaagtgcagaggtttttttctg

SEQ ID NO: 1539 - DNA, 224 bp, Homo sapiens
  full length sequence of bloodCirc_13457
gtcaactttgtagtgtgccaactctttgccttgctagcagccatttggtttcgaacttatctacattcaagcaaaactagctcttttataagacatgtagttgctacccttttgggcctttatcttgcacttttttgctttggatggtatgccttacactttcttgtacaaagtggaatttcctactgtatcatgatcatcataggagtggagaacatgcacaa

SEQ ID NO: 1540 - DNA, 210 bp, Homo sapiens
  full length sequence of bloodCirc_07460
acctaatctgggagcctgcaagtgacaacagcctttgcggtccttagacagcttggcctggaggagaacacatgaaagaaagaacctcaagaggctttgttttctgtgaaacagtatttctatacagttgctccaatgacagagttacctgcaccgttgtcctacttccagaatgcacagatgtctgaggacaaccacctgagcaatact

SEQ ID NO: 1541 - DNA, 200 bp, Homo sapiens
  full length sequence of bloodCirc_06725
atggtgaccctgataactatattgcttattatcggagggctactgtctttttagctatgggcaaatcaaaagctgcacttcctgatttaactaaagtgattcaattgaagatggacttcactgcagcaagattacagagaggtcacttattactcaaacaaggaaaacttgatgaagcagaagatgattttaaaaaagtg

SEQ ID NO: 1542 - DNA, 1116 bp, Homo sapiens
  full length sequence of bloodCirc_20409
caatgcagcaagtcttggaaaaccttacggagctgccctcgtctactggagcagaagaaatagacctaattttcctcaagggaattatggagaatcctattgtaaaatcacttgctaaggctcatgagaggctagaagattccaaactagaagctgtcagtgacaataacttggaattagtcaatgaaattcttgaagacatcactcctctaataaatgtggatgaaaatgtggcagaattggttggtatactcaaagaacctcacttccagtcactgttggaggcccatgatattgtggcatcaaagtgttatgattcacctccatcaagcccagaaatgaataattcttctatcaataatcagttattaccagtagatgccattcgtattcttggtattcacaaaagagctggggaaccactgggtgtgacatttagggttgaaaataatgatctggtaattgcccgaatcctccatgggggaatgatagatcgacaaggtctacttcatgtgggagatataattaaagaagtcaatggccatgaggttggaaataatccaaaggaattacaagaattactgaaaaatattagtggaagtgtcaccctaaaaatcttaccaagttatagagataccattactcctcaacaggtatttgtgaagtgtcattttgattataatccatacaatgacaacctaataccttgcaaagaagcaggattgaagttttccaaaggagagattcttcagattgtaaatagagaagatccaaattggtggcaggctagccatgtaaaagagggaggaagcgctggtctcattccaagccagttcctggaagagaagagaaaggcatttgttagaagagactgggacaattcaggacctttttgtggaactataagtagcaaaaaaaagaaaaagatgatgtatctcacaaccagaaatgcagaatttgatcgtcatgaaatccagatatatgaggaggtagccaaaatgcctcccttccagagaaaaacattagtattgataggagctcaaggtgtaggccgaagaagcttgaaaaacaggttcatagtattgaatcccactagatttggaactacggtgccat

SEQ ID NO: 1543 - DNA, 496 bp, Homo sapiens
  full length sequence of bloodCirc_16349
gattcttactacagatttaatgaccttaactacagatgggtctctttggataactggacctatagcaaagaatttaaaatcccctttgaaattagcaaatggcaaaaagtaaatttgattcttgagggagtggatacggtttcaaaaatcctgttcaatgaagtcactattggggaaacagacaatatgttcaatagatatagctttgatattaccaacgtggtcagggacgtgaactccattgagctgcgtttccagtcagcggtgttgtatgcagcacagcagagcaaagctcacactcgctaccaggttcccccagactgccctccacttgtgcagaagggtgaatgccatgtcaactttgttcggaaggagcaatgttcctttagttgggactgggggccttcctttcctacccagggaatctggaaagatgttagaattgaagcctataatatttgtcacctgaactacttcacattttccccaatatatg

SEQ ID NO: 1544 - DNA, 118 bp, Homo sapiens
  full length sequence of bloodCirc_12976
ggaagtcgagataacatgagtattgtactagtttgcttttcaaatgctcccaaggtctcagatgaagcggtgaaaaaagattcagagttggataagcacttggaatcacgggttgaag

SEQ ID NO: 1545 - DNA, 141 bp, Homo sapiens
  full length sequence of bloodCirc_05296
ggcaaggcctggagaatgtctgtagcgaagacatccgtggacattcttaagatactatgtgacattcagaaagacaatctgcagaagaaggacgaatgtgaagaaatgttgaaactatttaaagaggttgctagcttacag

SEQ ID NO: 1546 - DNA, 16017 bp, Homo sapiens
  full length sequence of bloodCirc_13459
gctgcccgccacatgattcccgggtgtctttccccttccgtgtgtctcacgtacctggcagagtccacaggcgaaaagcaagtatctttgttgtatccctttttaagagtgaggaagactttcccagtaatccctagccatatttctcattgaacagaattgcagcacagttacattcccagaattagttgttggtgatgattggctgagaccagtcactattcatcccatgagactagtgaagagtctagcttttcttaaaacacatgactgcctggtctggttactgaacaacatctgggttcttttagcaaggagaaagtatactgctatggggtatctaaaagatcatttcatcttagtacttggtacttggtacagggctgcctcattctttgtgatggctagagagcattcattccattcacttcatgtaccatgctttagtagtctctgtcttttccaattttgatattatcactgtgctgcagtacatgtttataaatgtaaatacatcgtcttccctatttccaaattgttcactattaacgttatgtcagtatatattaaatacttccaccaacaatgtttagtgtgcctgtttccttatacacttgacagtacagaatactgctgaagtctatctgatagatgaaaatgttattttactttgattttaatttccgtttcttgtattatagggtttgggcatcttttcttaggaatgaatcatttgtgattctttttctgagacctgactgtgcctatgctctgcctacttttctattatactgtttttattattgatatgtgggagcttccgatagattaaagaaattagctcttggtgatatgacttatattgttgcttttttttttttttagcttgagttacttttatttatttatttatttttattatactttaagttctagggtacatgtgcacaatgtgcaggtttgttacatatgtatacatgtgccatgtcggtgtgctgcacccattaactcggcatttacattaggtatatctcctaatgctatccctcccccctccccccaccccacgacaggccccggtgtgtgatgttccccttcctgtgtccaagtgttctcattgttcagttcccaccaatgagtgagaacatgcagtgtttggttttttatccctgtgatagtttgctgagaacgatggtttccagcttcatccatgtccccacaaaggacatgaactcatccttttttatggctgcatagtattccatggtgtatatgtgccacattttcttaatccagtctatcattgatggatatttaggttggttccaagtctttgctattgtgaatagtgccacagtaaaaatatgtgtgcatttatctttataacagcatgatttataatcctttgggtatatacccagtaatgggatggctgggtcaaatggtatttctagttcgagatccttgaggaatcgtcacattgtcttccacaatggttgaaccagtttacagtcccatcaacagtgtaaaagtgttcctgtttctccacatcctctccagcacctgttgtttcctgactttttaatgattgccattctaactggtgtgagatggtatctcattgtggttttgatttgcatttctctgatggccagtgatgatgagcattttttcatgtgtctgttggctgcataaatgtcttcttttgagaagtgtctgttcatgtccttcgcccactttttgatggggttgtttgtttttttcttgtaaatttgtttgagttctttgtagattctggatattagccctttgtcaggtgagtagattgcaaaaattttctcccatcctgtaggttgcctgttcactctgatggtagtttcttttgctgtgcagaagctctttagtttatttagatcccatttgtcaattttggcttttgttgccactgcttttggtgttttagacatgaagtccttgcccatgcctatgtcctgaatggtattgcctaggttttcttctagggtttttatggttttcggtctaacatttaagtctttaatccatcttgaattaatttttgtataaggtgtaaggaagagatccagtttcagctttctacatatggctagccagtttttccagcaccatttattaaatagggaatcctttccgcatttcttgtttttgtcaggtttgtcaaagatcagatggttgtagatgtgtggtattatttctgagggctctgttctgttccattggtctatatctctgttttggtaccagtactatgctgttttggttactgtagccttctagtatagtttgaagtcaggtagcgtgatgcctccagctttattcttttggcttaggattgtcttggctatgtgggctcttttttggttccatatgaactttaaagtagttttttccaattctgtgaagaaagtcattggtagcttgatggggacggcattgaatctataaattaccttgggcagtatggccattttcacaatattgattcttcctacccatgagcatggaatgttcttccatttgttggtatcctcttttatttcgttgagcagtggtttgtagttctccttgaagaggtccttcacatcccttgtaagttggattcctaggtactttattctctttgaagcaattgtgaatgggagttcactcatgatttggctctctgtttgtctgttattggtgtataggaatgctcgtgatttttgcacattgattttgtatcctgagactttgctgaagttgcttatcagcttaaggagattttgggctgagacgatggggttttctaaatatacaattatgttatctgcaaacagggacaatttgacttcctcttttcctaactgaataccctttatttctttctcctgcctgattgccctggccagaacttccaacactgtgttgaataggagtggtgagacagggcatccctgttttgtgccagttttcaaagggaatgtttccagtttttgtccattcagtatgaaattggctgtgggtttgtcataaatagctcttattattttgagatacgtcccatcagtacctaatttattgagagtttttagcacgaagggctgttgaattttgtcaaaggccttttctgcatctgttgagataatcatgtggtttttgtcgttggttctgtttatgtgctggattatgtttattgatttgcatatgttaaaccagccttgcatcccagggttgaagcccacttgatcatggtggataagctttttggtgtgctgctggattcggtttgccagtattttactgaggatttttgcatcgacgttcatcagggatattggtctaaaagtctctttttttcttgtgtctctgccaggctttggtatcaggatgatcctggcctcataaaatgagttagggaggattccctctttttctattgattggaatagtttcagaaggaatggtaccagttcctccttgtacctccggtagaaattggctgtgaatgtgtctggactttttttggttggtaagccattaattattgccccaatttcagaacctgttattggtctattcagagattcaacttcttcctagtttagtcttgggagggtgtatgtgtcgaggaattcatccatttcttctagattttctagtttatttgtgtagaggtgtttatagtattctctgatggtagtttgtatttctgtgggatcggtggtgatatcccctttatcattttttattgtgtctgtttgattcttctctcatttcttctttattagtcttgctagtggtctatcaactttgttgatcttccaaaaaaccagctgctggattcattgattttttttgaagggttgtttgtgtctctatctccttcagttctgctctgatcttagttatttgttgccttctgctagcttttcagattgtttgctcttgcttctctagttcttttaattgtgatgttagggtgtcaattttagatctttcctgctttctcttgtgggcatttagtgctataaatttccttctacacactgctttgaatgtgtcccagagattctggtatgttgtgtctttgttctcattggtttcaaagaacatctttatttctgccttcatttcgttatgtacccagtaatcattcaggagcaggttgttcagtttccatgtagtttagtggttttgagtgagtttcttaatgctgagttgtagtttgattgcactgtggtctgagagacagtttgttataatttctgttcttttacatttgctgaggagtgctttacttccaactatgtggtcaattttggaataagtgtgatgtggtgctgagaagaatgtatattcttttgatttggggtggagagttctgttagatgtctattaggtccacttggtgcagagctgagttcaattcctggatatccttgttaactttctgttttgttgatctgtctgatgttgacagtgggtgttaaagtctcccattattattgtgtgtgagtctaagtctgtttgtaggtctctaaggacttgctttatgaatctgggtgctcctgtattgggtgcatatatatttaggatagttagctcttcttgttgaattgatccctttaccattatataatggccttctttgtctcttttgatctttgttggtttaaagtctgttttatcagagactaggattgcaagccctgcctttttttgttttccatttgcttggtagatcttcctccatccctttattttgagcctacgtgtgtctctgcacatgagatgggtctcctgaatacagcacactggtgggtcttgactctgtccaatttgccagtctgtgtcttttaaatggagcatttagcccatttacatttaaagttaatattgttatgtgtgaatttgatcctgtcattaagatgttagctggttattttgctcatttgttaatgcagtttcttcctagcatcgatggtctttacaatttggcatgtttttgcagtggctagtactggttgttcctctccatgtttagtgcttccttcaggagctcttttagggcaggcctggtagtgacaaaatctctcagcatttgcttgtctgtaaagtattttatttctccttcacttatgaagcttagtttggctggatatgaaattctgggttgaaaattcttttctttaagaatgttgaatattggcccccactctcttctggcttgtagagtttctgccgagagatccgctgttagtctgatgggcttccctttgtggataacccgacctttctctctggctgcccttaacattttttccttaatttcaactttggtgaatcttacaattatgtgtcttggagttgcacttctcgaggagtggcattctcagtatttcctgaatttgaatgttggcctgcctttctaggttggggaagttcttctggataatatcctgcagagtgtttttccacttggttccattctccccgtcacttttaggtacaccagtcagacgtagatttggtcttttcacatagtcccatatttcttggaggcttttttcgtttctttttactcttttttctctaaagttctcttctcgcttcatttcattcatttgatcttcaatcactgataccctttcttccagttgttcgaattggctactgaagcttgtgcattcatcacctagttcttatgccatggttttcagctacatcaggtcatttaaggacttctctacactggttattctagttagccattcgtctaatcttttttcaaggtttttagcttctttgtgatgggttcaaacttcctcctttagctcagagaagtttgatcgtctgaagccttcttctctcaactcgtcaaagtcattctccatccagctttgttccattgctggcgaggagctgcattcctttggaaggggagagacactctgatttttagaattttcagcttttctgctctgttttttccccatctttgtggttttatctacctttggtctttgatgatggtgacatacagatggggttttggtgtggatgtcctttctgtttgttagttttccttctaacagtcaggaccctcagctgcaggtctgttggagtttgctggaggtccactccagaccctgttttcctgggtattagcagcagaggctgcagaacagcaaatattgctgaacagcaaatgttgctgcctgatcgttcctctggaagctttgtctcagagggatacctggccatgtgaggtgtcagtctgcccctactggggggtgcctcccagttaggcttctcgggggtcagggacccacttgaggaggcagtctgtctgttctcagatctcaaactccgtgctcgaagaaccactactctcttcagagctcagttggaaatgcagaaatcacctgtcttctgcgtcactcactctgggagctgtagactggagctgttcctattcggccatcttggaactgcctactattgcttttaagtttgttgtttgtcctttgactttgtttatggtgttttgcccatgaaggaattttttatatttatgtgatgaagttgtatctaattttttttattgtttccaaagtttgtgttatactcaaaatatttcagatattatctttatcatattctgaatacccattatgtgtttggatctatcactggaattctagttatatttcactgatctgtctgttcgtctgttcatcattctaggttctaaaaaatgtgttctagtctgtgaaaggaaggtcataaattttctggctatctcacatgtttatatttcaatattagttttaaaatcaaattttattttttaaaaatcctattgacatttttattgtatggacttaaatttaatgattaacatagggagaaagtaacatctttatgattccgagtcttcccatccaagaatgttttgcgtttccatttattcgagtgaagctctttgagcagggtatctgctttggacagttttgtgaacctctgtttcattagagccattacatattttttgtgtctatttattacagtacatagtgttactgttaataatacataaggtttaataaaaaactaaaagtcagtatctgtgtaaccaccctgggcaaaaagtagaaacattaccagcccacaaaatcccttgttgtctgtcactattataacccgttctctcccttcatacgtaaacacttcagtgacttcagtgattgtcattttcatgtcaattatgtaggcattcccagacagtatggtttattgcttgctttttggaactttttgtgaagtacatttatatgttgtatatatattcctctgaattgacttgagatgtatggattcttctagaaattatagtttcttcatcttcgttgttctgtgtgatttcccattgtacagataaaccagaatatatttagccattttgctgttaaaggttttatttttccttggcatttggctattatgaacaacattgtattgaacattcttgtacatgcctctcctagtccccatgttagacacatgggtattggagtgctctgtcatgggtaggactattttcaatcctgtaagaaaatactgaatttttttctaaagcacttgttgaccacgtatgagaaatcccattgctctacattgtagtctgcatttggtattgtgacactaaacttttggcaatctggtggatgtgtaatgatgtcgtatttggctttgttttatctcataaagatgtaaaaaatggttctttcctttgcctttgggccctatcatctttacttaactggctgcgaggttggttgatgaggactcttgttttccaaacgtagctgcacgtaagttttgcctgggaaattaaaaacaaaaaaaataattcaaggtctcatttcagactggggaataaaaagttacggagctagaatccaataatctgtttctaactagctgtcagatgatttttacacagctaaacttccacagataagattccagcacagggcgcttgaaactgaaggttgttctgtctgtctatactatgtcttcttagtctggtgagtatttggcagtcaagacacacctcaatttggaataaccacatataagtgctcatagccacatggggccagtgactattgcattgaacaatgcagatctgttcagaaaattgctcagcaataagtgtatagtttgttacgcattttgaactttgatatacactttgatctttcacatcaggttgtatacttcacgcctcctcactcccctttccatcaatgcagggtctcacaaagactggctgttcaccttgggagggactggttaagaatatgttatcaaaaatccgttaatgttatttttaaaaattagaacatattttgtattccatcagtagagatgtggatgtaacaattgattttttggggctgtttttattgatttgttgaagattgtaatcactttgcgctatattgaaatttaaggtttttttactccaaaattattataggttaatttttggcttagtgtagaatgcttaattctgatgtggagataattaacaagcttttgttgggcacgtgtggcagttgatgggcgtgtggctagtggctatcatatttgaacagtgcagatcttttcagaagattgctcaattacatataagtgtatggtttgatatgcattttaaataccctagaaactcctttctcgtgttctagtaagagggaggaaatttaaagcatataaagctggagaaaatatacatataaagctggagaaaatatacaatcttttgtggagacagaatgtaaatttgtggataacatttttgtattttttaaccacatgttaattaaagtgtaagcacccttagtaaaaatttaaaaatgataagatcaggttcaactttggaactaaaaggaaaaaagtgtaagatggagatcgcagaggttgaggtcccacatctgctgtacttgctgtttccttttaaagtagagataacactgatctcacatgagcattgaggataccttaggtttcgtgaaatgtaataaaatttattacacaggaatggaaaatgttagcactgggagcgctaaggtatttggtttaagtaggaaataggtatagataaatgttttaatgccgtaagtggaaaattcagaattcctggtttctcttactcaatgatataattacacttgaactattttctgttttttaaaaaaactaaaccaagaagtacattgatgcgtgtccatgtattcgtgtaatacagttgtatgtatactgcaaaaataaaaagctaaagagctcacagactgtaaaggaaatcactattggaaaagacaccataaacaaagatacaagactaagctgtagactgagagagatgctatttgcaaaagatcagtttcagatatataaagaattctttttaaagaagtcaatgagaaaaagacaagctgatagaataatgggcaaaggatataaagggaaaactaaatgtccaatagacataagaaaaatgttcatcctggctagtaatcaggagaaatacacatttaaaaaatagagaaataatgttttatatttattagcttggcaaaaattagtagtctgacagtaccaagtgttgtcaagaatatggagcagtggaactcacattgctgataaataattaggagagcaatttagcaatacttagtcaagtggatgttgcttgacttggaggttctactctgggtattaacacaatgaaatataatacacaagatgagtaaataaggtagagccatgtgtatcaacatagataaatgtcagcaatgtaatattaagtgaaaaaaattgcagaagcttacgttcagttttacaccatttttagtttaaaatattcaaagcaatgcaatatgtaaattagtcaagtggatgttgcttgacttggaggttctactctgggtattaacacaatgaaatataatacacaagatgagtaaataaggtagagccatgtgtatcaacatagataaatgtcagcaatgtaatattaagtgaaaaaaattgcagaagcttacgctcagttttacaccatttttagtttaaaatattcaaagcaatacaatatgtaaaatacacaagtagcaaaagtataaaaatatgcacgagaatactgcagcaaacttaaggctggtagttactctttgtgggaggggtggaaggaatagggccagaggaggggtttgcacaggaggcttcattgtacgtgtagtattagaaatactggaatatttcaagtccctgtcgttctccattacctccttcctagaggtgacagcatctaatggtttagtgtctagtgtttctgggcctgtgcatatggaagtagaatagcatgggctctggagtaagggtacctggttgtgcaaggtggctgtgattattacatgaaccccttcttgtaaagcacagtgcgctgcactgcctggcacacatctggtatctactgagcacctacagttagtgaagtatggtatatataaatggactatatggacactatattaatgtctagcacatagtaaaagcatagtaggctcataattacagaataaatgcatatttaataaatgaatgtatatacatagtttggatttttcttctacaactcgtaactttcacttactagtatttcttggtaatcttccatatcaaaatatacagatttatataattattttcaccacattttaaaaaatctaattttaatttttagtttcaggttgggtgtggtggctcatgcctataatcccagcactttgggaggccaaggcgggtggatcacttgaggtcagaagttcaagaccgcctgaccaacatggagaaaccccatctctactaaaaatacaaaaattagccgggcgtggtagtgcatgcctgtaatcccagctgcttgggaggctgaggcaggagaatcacttgaacccgggaggcagaggttacagtgagctgagatcgtgccactgcactctagcctgggcaacaagagcaaaattgtctcaaagaaaaaaaaattagtttctttttgtgactttcgggttagttttttccctccccctgcccccccgcctcaattttttttttttgagacaggctctcactctgttgcctaggctggaatgcagtggcgtgatcacagctcactgcaaccttgacctccaaggctcaagcaatccttccacctcacctccccagtagctgggactactggtgtgcaccaccatgcccagctaatttttgtatttttttgtagagatggggtttcaccatgttgcccaggctcaaactcctggattcaagtgatcttcctgtcttggcctcccaaagtgttgggattgtaggtaggagccacctcgctcggccctgatctttgaactgatgtttatctttctcctactggcgtttaggagttctttctaccttttgaatactaactctttgttacatatcccatgtgtgtatataggttctttttccttccacattgttacttaggatgtttttagtttttttgttgttgttgttttgtagaagtttttaatttttatgagtaaatccattcaatatataaaatttatattaaattattgttatatcacataagattataatctcttacattcttgtctaggatatatatatatatagttttagttttcatagctaggttatgctgcagtaataaactatctccaaatctcacaggctcaaaccaccaaaggtccctcttgctacttgcccactcatggactggcagggtaatttgcacctcagcatttctggaacattgcagatagaacaactctgaagattcttgttctggcagttaagtgttctggccgagaagcaacacacatcacttctgctaacaattcaccaaccaaaactcgtccccacaagggactaggaaatacatcctctgtctacccagaaggagaagagaatcagatataggtgactggtactaaagaccatcacagttgtttatggaccattattctgtttggggtttgtttttaaatgtggtaggcagtataatgcagtggtcaggaattcaaattctagatctagactacctgatttgtaacgagttacactagttaaactgtttcagtctcggtaaatggagataatagtagagttctcctcatagggttattgtgaagattaaatagattataaatgtaaggtgcttagagtgttgtgtcagcttgggtcctctgaggagcaggtgccaaggagcaattagatgagcaagtgatgagctggggaagttgtctatgagacagtgctctggggagctggcagaagggagagctgcggactgcaggacagtcccctctggaggagagggggaaggaaggaaggctgggcagggggaggcacaggctgtagggagtatggccttggcatgaatctgggcagggagcctggctgtggagaagtgaagttctaaggaggtcccagcatggccttggcatgagcctggtgatgggtatcaagtgtgctgcagatgatgctcttggtcaattatgccccctgcgggtggagatttgaggggtgtgtactcatacctgccacataagcacacgattaatattaacaacgtggcttatgaaacaggagtgtaacttggtttttaccaaaaggaaaaccagttaccccagttacattaattggataatctaggtttgtttttcctactgatgggaaatatctagctttttttttttccctactgatgggaaatggaaatgctgcttctctgtagatgtgaaatgctctatttgtgtaacagtcccctgtggatggccctgtgcatgtgtgctctgacagtgtgtagtggatcttcatgtgtgcctaagcctcttgtgcttttgtgcactttatctggggtaaagttgtaaatgttcagtttcttggtaaaggatattatgttttaagttttggtggccattgtccaattttctttaaagagctgccccaagttacagtcagattaacagtgtagagcaccagctttctcatgtccccagcagcactgagaggcggaagatagtgcctcactgatggtttatttcacacttcgttacttatggttgagagagaatatttttcagattttattggacattgatatttgtaaattgttcattccttttgcccagttttctattgagtggttcatagtttctcatgggtatccaagagttctggatatgtagaggtggagggtcaatctcatcacttccttgttttaaaaatcttccatggttttgtcatcactatgggctcaaacgccgtggtgtggcatacaaagccctcacttctgaaccaccctgcttccagcctcatctcccatgatccctggccacgcggtgcgtttgcgctttcatgtccaagtgcttccttcatgttgttttcttccttacaatgccctttcccttattgtccaacagagtgcttctcacaccttgaggatcataagaacctgtgtttccattttattttttatacatatttttgggcctatctccccaaagactttgattcagtgtccagtgtgaggcctgatctcattttctttatctgaacgatgacaatgttgaaaagagatgatttcaaagattctgtaaaatcctgtatgtgtgtggtccttgacatactctttcttggaaggaatcatactttgtcttgtaatgtatgaatagactgatatggaatgggggaagggaagctgccccctcctatggttgtggagatcagcgggattgggaaatgctgcccgccctgcttacccctcacatcctttgtggcaggcaccccttcaggcgtgctcttctgtggtgtcttgaaggatgttctatataaccattaaaaagactctgatgttgggttgacgttccttctgtatatgtttatgttttccattaggttctaaagtcatcctgagctaggactgggactcatgcatgtttagatttcccatgtttgcccatagtagatgctcagtaaatttttgttataataattaaattaggagctatctgaaaaagaaagaaataagagatacttgaaacaaagttttaaactgtaagaagccatgtagatgtgagtagttaatatgaagaacacaaatttttccattctattcactttttgcttaattaaaaaaaatgccattagaaccctttagaaggcaggaagtattagaaccttttggaaagacattttgcttttattgagtctgttttaaagaacaattgtttcttagacagtgtacaacaacgttctactgtttttctccttgatatgtgagaaagagaacatacttgtctgtgtctttaggcagagatatttctatgggtctatggaaatagctacatgtagatagtgtgatttgttcacaatttaggtgcctgaaacactgattgttttgttatgtattttttttgcaggttcctaatgtcaatggattttttcctttatttatagactttaaggcctattattcctaagattctatgagaatatgtttcataagggagaaatggagattttggccaggtgtgattgttcatgcctattatcccagcactttgggaggcagaggcaggcagattgtttgagcccaggagttcaagaccagcttgagcaacatagtgacactttgtctttacaaaaaaatgcacagattagctcggcatggtggtgtgtgcctgtagtcccagctacttggaaggctgaggtgggagaattgcccgagcccgggaggtagaggctgcagtgagctgtgatttcaccactgcagtccagcctgggccacagagcaagaccctgtcttaaaaaaaaaaaaaaagaaaaaaaggaaatggagatttttctccagtctatctttacataccatgagagattcttattttcagtctttttatttggagggaaaagagcagcagcagtcttaccagagtgtatttcacttctataagtcaagaacagtttagttcctagtgaactataaggaaatttaaaaattgaggttggtggacttgagcttttcgaaggctgctttgtcccttatctaattcattccttccccttgggagccaatccttgagatgcctcagagctcagctacagtggtgatgtttaggccgcagtagattcccctttactcctattgccatagactgtcctgcatcccaccagatcctccaggccctggtgcccttatagtctcagggaacttggggacattgacccctcccagagcttttgcgaagaaatttagtgctcctctttttcacgggttacagggttccctcagtcattaaaacacgtttctcttccctttaaccgataggtgccctgggctttttgtttctgtgtctgcagaccagtgtcaatcagatttttccaggtgtccttctacacctctccccacgtggccacacctgtctcctgccaggtctagcagagacagtattggtgggcattggcccatcacttggaacttgaggctcatccttgggatttccctcaatttttgtttttgttttgttaacttggaaggtcaatttttgtgtaaccttggtgtttttgtcctgagaatttcaatgtaacatgatatgaaaaattcaggtctgtgttgctaatacaaaattttaatttttctttacaggtcaactttgtagtgtgccaactctttgccttgctagcagccatttggtttcgaacttatctacattcaagcaaaactagctcttttataagacatgtagttgctacccttttgggcctttatcttgcacttttttgctttggatggtatgccttacactttcttgtacaaagtggaatttcctactgtatcatgatcatcataggagtggagaacatgcacaa

SEQ ID NO: 1547 - DNA, 276 bp, Homo sapiens
  full length sequence of bloodCirc_06911
aatctacctgttactcgtattttggacaatcttatggagatgaagtcaaaccccgaaactgatgactatagatattttgatcccaaaatgctgcggggcaatgacagctcagttcccagaaataaaaatccattccaagaggccattgtttttgtggtgggaggaggcaactacattgaatatcagaatcttgttgactacataaaggggaaacaaggcaaacacattttatatggctgcagtgagctttttaatgctacacagttcataaaacag

SEQ ID NO: 1548 - DNA, 361 bp, Homo sapiens
  full length sequence of bloodCirc_02265
gaagagcagcgaagaggcacaaaaagagaggagaaggatatcaaatttattgaacataatggaaccaagcctccttcagttttatatttctcgacagtggcttaataaatttaagacctttgccgaacctggccctatttcaaataatgactttctttgtattcatggaggtgttcctccaagaaaagctggttatattgaagacctggttttgatgctgcctcagaacatttgggataacctatatagcaggtatggtggaggaccagctgtcaaccatctgtacatttgtcatacttgccaaattgaggcggagaaaattgaaaaaagaagaaaaactgaattggaaatttttattcgg

SEQ ID NO: 1549 - DNA, 204 bp, Homo sapiens
  full length sequence of bloodCirc_12279
gacagtatttatgatgaaatggaagagaagtggtcaaaacagaaggcgaaatggaagaaggatgagaagttcgagcgagaaaatatcctgctacagcaaaaaaaaaagatgaccaaaaaattcgaaatggagtcaggagaagaagataagaaaataaatgaatcctgcagtgctgtctttgagaacttcattcaagagaaggag

SEQ ID NO: 1550 - DNA, 469 bp, Homo sapiens
  full length sequence of bloodCirc_00882
ctaataaggcagtggattttacaacagtcaaattcttgcttcaggattctagaagtttgttacatgctttcagtacaaggtcaaattatgatggtattcttccacagacctttgctcaagtaaacaacctccttcagacatttgcagaggtcaagacaaaacttaagccaaattcttcagaaaacacagtgactaaaaagcaggaaggtacttcattgaagaattctcataatcaagaaatcactgttttctcgagttctcatcttccccaacccagcaggcatcaagaaatctggtctatcctagagagtgtttggattacaatatatcagaacagcacggatgtatttcaaagattgggctcaaattcagctctgactacttcaaatatagcatcatttgaagaagcatttatatgtcttcaaaagttaatggcagctgtgagggatattcttgaaggaattcaaag

SEQ ID NO: 1551 - DNA, 210 bp, Homo sapiens
  full length sequence of bloodCirc_21702
atatgtgtacttcctgataagcagagatgatgaaataatggcctattaaaagcaagtaagtttctataaaaacgcccaagcagggatttaaggcatctcctgcatgcacagttgcagttagttattccaggtattatttttgttttcagaaaaagaaaactcagtagaagataatggcaagtccagactggggatatgatgacaaaaatg

SEQ ID NO: 1552 - DNA, 186 bp, Homo sapiens
  full length sequence of bloodCirc_06790
ctcttcagagaagtaagaataatgaagattttaaatcatcccaatatagtgaagttattcgaagtcattgaaactgaaaaaacactctacctaatcatggaatatgcaagtggaggtgaagtatttgactatttggttgcacatggcaggatgaaggaaaaagaagcaagatctaaatttagacag

SEQ ID NO: 1553 - DNA, 605 bp, Homo sapiens
  full length sequence of bloodCirc_06499
aaagaatcttcaagagggagacatagggaaaaggaagacataaaaatcactaaggaaagaactccagaaagtgaagaagaaaatgtagaatgggaaactaatagagatgattctgacaatggagatattaattatgattatgttcatgaattgtcattggaaatgaagcgtcagaagatacagagggaattaatgaagctggaacaagaaaacatggagaagagagaagaaattatcattaaaaaggaggtttcaccagaagtggttagatcaaaattgtccccgtcaccttctctaagaaagtctagcaaatctccgaagcgaaaatcaagcccgaagtcgtcttcagctagcaagaaagataggaagacatctgcagtatcttctcccctgttggaccagcagagaaattcaaaaaccaaccaaagtaaaaagaaaggaccacgtactcctagtccaccccctcctataccagaagatatcgctctggggaaaaaatacaaagaaaaatataaagtaaaagacaggatagaagaaaaaacaagagatggaaaggacagaggacgagattttgaacgacaaagagaaaagagagacaagccaag

SEQ ID NO: 1554 - DNA, 260 bp, Homo sapiens
  full length sequence of bloodCirc_19179
aaattagcagagtacggaaagacatgtacaatgacacattaaatggcagtacagagaaaaggagtgcagaattgcctgatgctgtgggacctattgttcagttacaagagaaactttatgtgcctgtaaaagaatacccagattttaattttgttgggagaatccttggacctagaggacttacagccaaacaacttgaagcagaaaccggatgtaaaatcatggtccgaggcaaaggctcaatgagggataaaaaaaag

SEQ ID NO: 1555 - DNA, 398 bp, Homo sapiens
  full length sequence of bloodCirc_15650
tttggtggagaaccattgtcatatacccggttcagcctggctcggcaagtagatggcgataacagtcatgtggagatgaaacttgctgtagatgaagaagaaaatgctgacaataacacaaaggccaatgtcacaaaaccaaaaaggtgtagtggaagtatctgctatgggactattgctgtgatcgtctttttcttgattggatttatgattggctacttgggctattgtaaaggggtagaaccaaaaactgagtgtgagagactggcaggaaccgagtctccagtgagggaggagccaggagaggacttccctgcagcacgtcgcttatattgggatgacctgaagagaaagttgtcggagaaactggacagcacagacttcaccggcaccatcaa

SEQ ID NO: 1556 - DNA, 324 bp, Homo sapiens
  full length sequence of bloodCirc_20947
gttacgagaagtttctgagaagctgaacaaatataatttaaacagccacccccctttgaatgtattggaacaggctactattaaacagtgtgtggtgggaccaaatcatgctgcctttcttcttgaggatggtagagtttgcaggattggtttttcagtacagccagacagattggaattgggtaaacctgataataatgatgggtcaaagttgaacagcaactcgggggcagggaggacgtcaaggcctggtaggacaagcgactctccatggtttctctcaggttctgagactctaggcaggctggcaggcaacaccttagg

SEQ ID NO: 1557 - DNA, 242 bp, Homo sapiens
  full length sequence of bloodCirc_04013
gtacacctgagagcctggcagaaaaagaacggcagctctccaccatgattacccagctgatcagtttacgggagcagctactggcagcgcatgatgaacagaaaaaactggcagcgtcacaaattgagaaacaacggcagcaaatggaccttgctcgccaacagcaagaacagattgcgagacaacagcagcaacttctgcaacagcagcacaaaattaatctcctgcagcaacagatccag

SEQ ID NO: 1558 - DNA, 434 bp, Homo sapiens
  full length sequence of bloodCirc_06935
gcccggattgcatttctacaaggcgaaagaaaaggtcaagagaacctgaagaaggacttagtaagaagaataaagatgttagagtatgcattaaaacaagaaagggcaaaatatcacaaattaaaatatggcacggaactgaaccaaggtgacttgaaaatgccaacctttgagtcagaagaaaccaaagacacagaggctcccacagcacctcagaatagccagttaacgtggaagcaaggcagacagcttttaagacagtatcttcaggaagtaggttatacagatacaatattagatgtacggtctcagcgggtaaggtcattacttggactatctaattcagaaccaaatggatcagtagaaacaaagaatttagaacagatcctgaatggaggtgaatctcctaagcaaaagggacaagaaataaaaag

SEQ ID NO: 1559 - DNA, 283 bp, Homo sapiens
  full length sequence of bloodCirc_11737
gatctgcccaataacatgattcatcaggtgccaattaaatccctccctcaagaatggctttggtgtgaaacgtggtgtgatgacgcctctaagaaaagggcaaaaaccattgatttgtgtaataatccgatgaccaaagagccgaaactggaagcagctgtgcggattgtcccggagtggcaggactacgaccaagagatcaaacagctacagatccgctttcagaaggagaaagaaacgggagcactgtacaaagagaagacaaaagaaccaagccgagaag

SEQ ID NO: 1560 - DNA, 297 bp, Homo sapiens
  full length sequence of bloodCirc_02879
gataaaatggaccagttgctacagatgctgcaaagtacagaccccagtgatgatcagccagacctaccagagctgcttcatcttgaagcaatgtgtcaccagatgggacctctcattgatgaaaagctggaagatattgatagaaaacattcagaactctcagaacttaatgtgaaagtgatggaggccctttccttatataccaagttaatgaacgaagatccgatgtattccatgtatgcaaagttacagaatcagccatattatatgcagtcatctggtgtttctggttctcag

SEQ ID NO: 1561 - DNA, 394 bp, Homo sapiens
  full length sequence of bloodCirc_20719
gcctgatcaaccccgtataaccaaagatgtaatttgttttcatgctgaagatttcttagaagtagttcaacgaatgcagttagatttacatgaacctccactgtcccagtgtgtccaatgggttgatgatgcaaaactgaatcaactgaggagggaaggcattcgctatgccaggattcagctatatgataatgacatttattttattccaaggaatgttgttcatcagttcaagacagtttcagctgtatgcagtttagcatggcatattcggctcaaattatatcactcagaggaggacacttctcagaatacagctactcatgaaacaggcacatcatcagattccacatcatctgttcttggacctcacactgacaacatgatttgtgct

SEQ ID NO: 1562 - DNA, 318 bp, Homo sapiens
  full length sequence of bloodCirc_17108
attttcagctgaactctcatctctcaacactggcaaatattcataagatctaccacacccttaataagctgaacctaacagaagacattggccaagacgatcaccaaacaggaagtctgcggtcttgcagttcttcagactgctttaataaagtgatgccaccaaggaaaaagagaagacctgcctctggagatgatttatctgccaagaaaagtagacatgatagcatgtatagaaaatatgattcgactagaataaagactgaagaagaagccttttcaagtaaaaggtgcttggaatggttctatgaatatgcag

SEQ ID NO: 1563 - DNA, 167 bp, Homo sapiens
  full length sequence of bloodCirc_21844
gagcatttcatactactgaagctgaagctagttctcagagtttgactcagatatatgccttacctgaaattcctcaagatcaaaatgctgcagaatcgtgggaaaccttagaagcggacttaattgaacttagccaactggtcactgacttctctctcctagtgaat

SEQ ID NO: 1564 - DNA, 192 bp, Homo sapiens
  full length sequence of bloodCirc_12598
accatcatcaaagaggggatgctgaccaaacagaacaattcattccagcgatcaaaaaggagatactttaagcttcgagggcgaacgctttactatgccaaaacggcaaagtcaatcatatttgatgaggtggatctgacagatgccagcgtagctgaatccagtaccaaaaacgtcaacaacagttttacg

SEQ ID NO: 1565 - DNA, 279 bp, Homo sapiens
  full length sequence of bloodCirc_00556
gttaatacaatctgttggaatgacactggagaatatattttatctggctcagatgacaccaaattagtaattagtaatccttacagcagaaaggttttgacaacaattcgttcagggcaccgagcaaacatatttagtgcaaagttcttaccttgtacaaatgataaacagattgtatcctgctctggagatggagtaatattttataccaacgttgagcaagatgcagaaaccaacagacaatgccaatttacgtgtcattatggaactacttatgag

SEQ ID NO: 1566 - DNA, 202 bp, Homo sapiens
  full length sequence of bloodCirc_19977
acagtaaggattgtatcctggagccgctttccctgccagaaagtccaggtggcaccaccactttagaaggttctccatctgtgccttgtattttctgtgaagaacattttcctgtggctgaacaagacaaacttctgaagcacatgattattgagcataagattgtcatagctgatgtcaagttggttgctgatttccaaag

SEQ ID NO: 1567 - DNA, 481 bp, Homo sapiens
  full length sequence of bloodCirc_02334
gatcggaaactccatggtacagctcagcaactgctccaggacagcaagacaaaaatagaagtcatacgaatgcagattcttcaggcagtccagactaatgaattggcttttgataatgcaaaacctgtgataagtcctcttgaacttcggatggaagaattaaggcatcattttaggatagagtttgcagtagcagaaggtgcaaagaatgtaatgaaattacttggctcaggaaaagtaacagacagaaaagcactttcagaagctcaagcaagatttaatgaatcaagtcagaagttggaccttttaaagtattcattagagcaaagattaaacgaagtccccaagaatcatcccaaaagcaggattattattgaagaactttcacttgttgctgcatcaccaacactaagtccacgtcaaagtatgatatctacgcaaaatcaatatagtacactatccaaaccagcagcactaacag

SEQ ID NO: 1568 - DNA, 236 bp, Homo sapiens
  full length sequence of bloodCirc_17522
aagtcaacgaaaggttccgttgtccttgaccacgtattccatcacgtaaaccttgtggagatagattattttgggctacgttactgtgacagaagccatcagacgtattggctggatcctgcaaaaacccttgctgaacacaaagaactgatcaacactggacctccatatactttgtattttggtattaaattctatgctgaagatccatgtaaacttaaagaagaaataaccag

SEQ ID NO: 1569 - DNA, 256 bp, Homo sapiens
  full length sequence of bloodCirc_06933
aagaaaccaaagacacagaggctcccacagcacctcagaatagccagttaacgtggaagcaaggcagacagcttttaagacagtatcttcaggaagtaggttatacagatacaatattagatgtacggtctcagcgggtaaggtcattacttggactatctaattcagaaccaaatggatcagtagaaacaaagaatttagaacagatcctgaatggaggtgaatctcctaagcaaaagggacaagaaataaaaag

SEQ ID NO: 1570 - DNA, 322 bp, Homo sapiens
  full length sequence of bloodCirc_05228
cgcatttgtagccatgaagtgccatcttgcccaatatgcctctatccacctactgcagccaagataacccgttgtggacacatcttctgctgggcatgcatcctgcactatctttcactgagtgagaagacgtggagtaaatgtcccatctgttacagttctgtgcataagaaggatctcaagagtgttgttgccacagagtcacatcagtatgttgttggtgataccattacgatgcagctgatgaagagggagaaaggggtgttggtggctttgcccaaatccaaatggatgaatgtagaccatcccattcatctaggag

SEQ ID NO: 1571 - DNA, 190 bp, Homo sapiens
  full length sequence of bloodCirc_19200
tactatactggcaattgctggagaagattttgcaattgttgcttctgatactcgattgagtgaagggttttcaattcatacgcgggatagccccaaatgttacaaattaacagacaaaacagtcattggatgcagcggttttcatggagactgtcttacgctgacaaagattattgaagcaagactaaag

SEQ ID NO: 1572 - DNA, 323 bp, Homo sapiens
  full length sequence of bloodCirc_20976
aaatgagagataaaatgagaaaatggagagaagaaaactcaagaaatagtgagcaaattgtggaagttggagaagaattaattaatgaatatgcttctaagctgggagatgatatttggatcatatatgaacaggtgatgattgcagcactagactatggtcgggatgacttggcattgttttgtcttcaagagctgagaagacagttccctggcagtcacagagtcaagcgattaacaggcatgagatttgaagccatggaaagatatgatgatgctatacagctatatgataggattttacaagaagatccaactaacact

SEQ ID NO: 1573 - DNA, 334 bp, Homo sapiens
  full length sequence of bloodCirc_21101
tttctttcaagatggcttgaaaacagctgataagttgaaacagtacattgaaaaactggctgctgatttatataatataaaacagacccaggatgaagaaaagaaacagctaactgcactccgagacttaataaaatcctctcttcaactggatcagaaagaagattctcagagccggcaaggaggatacagcatgcatcagctccagggcaataaggaatatggcagtgaaaagaaggggtacctgctaaagaaaagtgacgggatccggaaagtatggcagaggaggaagtgttcagtcaagaatgggattctgaccatctcacatgccaca

SEQ ID NO: 1574 - DNA, 535 bp, Homo sapiens
  full length sequence of bloodCirc_20069
tacttgattctaaagctcgaaaggcctgctatagttcagaatatcacatttggaaaatatgagaaaactcatgtttgcaatttgaagaaatttaaagtctttggtggaatgaatgaagaaaatatgacagagctgttgtccagtggcttaaagaatgattataacaaagaaacattcaccttgaagcataaaattgatgaacagatgttcccttgtcgattcattaaaatagttccactcttgtcctggggacccagctttaactttagcatctggtatgttgaacttagtggcattgatgatcctgatatagtacaaccttgtctcaactggtatagcaagtaccgtgaacaggaagctattcgcctttgcctaaaacacttcagacaacacaactatacagaagcttttgagtcactgcaaaagaaaaccaagattgcactggaacatcccatgttaacagatattcatgacaagctggtgttgaagggtgattttgatgcttgcgaagagttgattgaaaaggctgtaaatg

SEQ ID NO: 1575 - DNA, 531 bp, Homo sapiens
  full length sequence of bloodCirc_14335
gttgagttgttacaacaaaagttgagagaaaagttggatgaatttaatgaattggctatacagaaagagtcggcagatagacaagtgttaatgcaggaagaagaaattaaacgtctggaggagatgaacatcaacatcaggaaaaaagtggcccagctccaggaagaagtggaaaaacagaaaaacatcgtgaaagggctggaacaggataaagaggtgttaaagaaacagcagatgagtagcttgcttctggcgtccacgttgcagtctacactagatgcaggcagatgtcccgagcctccttcgggcagccctcctgagggtccagaaatacagttagaggtgacacagagagcactcctgcggcgcgagagcgaggttttggacttaaaagaacagctagaaaagatgaaaggtgacttagaaagtaaaaatgaagaaatactacatctgaacttaaaattggacatgcagaacagccagactgctgtcagcctcagagaacttgaggaagagaacacgagcttgaag

SEQ ID NO: 1576 - DNA, 635 bp, Homo sapiens
  full length sequence of bloodCirc_04811
acttaattcagtgcacaaatgagatgaatgtgaacatcccacagttggcagacagtttatttgaaagaactactaatagtagttgggtggtggtcttcaaatctctcattacaactcatcatttgatggtgtatggaaatgagcgttttattcagtatttggcttcaagaaacacgttgtttaacttaagcaattttttggataaaagtggattgcaaggatatgacatgtctacatttattaggcggtatagtagatatttaaatgagaaagcagtttcatacagacaagttgcatttgatttcacaaaagtgaagagaggggctgatggagttatgagaacaatgaacacagaaaaactcctaaaaactgtaccaattattcagaatcagatggatgcacttcttgattttaatgttaatagcaatgaacttacaaatggggtaataaatgctgccttcatgctcctgttcaaagatgccattagactgtttgcagcatacaatgaaggaattattaatttgttggaaaaatattttgatatgaaaaagaaccaatgcaaagaaggtcttgacatctataagaagttcctaactaggatgacaagaatctcagagttcctcaaagttgcagag

SEQ ID NO: 1577 - DNA, 376 bp, Homo sapiens
  full length sequence of bloodCirc_11938
acctgtcatttactccatcctttatagtgatgctacaggacgaagaggaatggataaaaacattggcgagcaactcaataaagcgtatgaagccttccggcaggcatgcatggatagagattctgcagtaaaagaattacagcaaaagactgagaactatgagcagagaatacgtgaacaacaggaacagctgtcacttcaacagactattattgacaagctaaaatctcagttacttcttgtgaattccactcaagataacaattatggctgtgttcctctgcttgaagacagtgaaacaagaaagaataatttgactcttgatcagccacaagataaagtgatttcaggaatagcaagagaaaaactaccaaag

SEQ ID NO: 1578 - DNA, 509 bp, Homo sapiens
  full length sequence of bloodCirc_12288
caagagcctcctgatctagcagccaagactccccctgacctttggccatgtaccccaaccctctcatctactgcacctgctgggacccctggaacttgggaccacggaagctaatcaagacccctcaactaccacgcaagaactccacagggagttccaagctaactcctcttgtaccagctccaaaaaatcacaattacctccaaccaacaaaacctgttgtttccccaaaaatgaaaatccattcagcaaggcaagaagagactaataaatcattttatgaagtgatcaacgtgtcacctggctatcaacttgttcggaatcgggaacagatttctgtcaccttaggggatgagatgtttgataggaaaaagcggtgggaatcggagatcccggacaaaggcagattttccaggaccaacatcatttctgacctagaagagcaaatctcagagctgacagcaataattgaacaaatgaacagagaccaccagtctgcccagaaattg

SEQ ID NO: 1579 - DNA, 457 bp, Homo sapiens
  full length sequence of bloodCirc_15165
gatgaacttactgctgtgaatgtaaagcaaggcttcaataatcagccagccttcactggagatgaacatggctcagccagaaatattgtaattaacccatcaaagattggagcttattttagcagcatattagctgagaaactgaagcttaacactttccaggacacgggaaagaagaaaccacaagttaatgctaaagataattattggctggttactgctcgatcccagagtgcaattcatagttggttttctgacttagcaggaaataagccactttctattttggcaaaaaaggttcctatccttagtaaaaaagaggatgtttttgcatatttagctaaatattctgtgccaatggttcgagcaacgtggctgatcaagatgacttgtgcctattattctgctatatctgaagctaaaattaagaaacgtcaggctcctgatccgaatttgg

SEQ ID NO: 1580 - DNA, 179 bp, Homo sapiens
  full length sequence of bloodCirc_20975
aaatgagagataaaatgagaaaatggagagaagaaaactcaagaaatagtgagcaaattgtggaagttggagaagaattaattaatgaatatgcttctaagctgggagatgatatttggatcatatatgaacaggtgatgattgcagcactagactatggtcgggatgacttggcattg

SEQ ID NO: 1581 - DNA, 583 bp, Homo sapiens
  full length sequence of bloodCirc_08355
atgtaaccttctgtaatggaagatgattgaagacaaggggcctcgtgttgctgactactttgttgtagcaggattaactgatgtttcaaagcctctagaagaagaaattcacttcaatgatgcttgtcataaagtagctaaaccaaaagaacctattacagatgtttcagttattatcaaatctcttggggaggaagtcccacaggattatatctgtattgatgttaccccaactggattgtcagctgatcttaataatggaagtcttgtggggccacagatttacctttgctatagaagaggaagagataagcctccacttacagatctgggggttttatatgactggaaagaaagattgaaacagggttgtgaaattattcagagtactccctatgggcgccccgcaaatattagtgggagtacctcatcacaaagaatttatatcacttaccgaagagcctctgaaaacatgactcagaatacgttggctgtcactgacatatgtattattatacccagtaaaggagaaagcccaccacacacgttctgcaaagtcgacaagaatctcaataacagtatg

SEQ ID NO: 1582 - DNA, 229 bp, Homo sapiens
  full length sequence of bloodCirc_09860
gagcctacaagaaagtacgagatttagtcaacttgttgaagagctattgaaaatcatttgtgcttttcagcttgacacaggtttggagtatgcaaacagctataattttgcaaaaaaggaaaataactctcctgaacatctaaaagatgaagtttctatcatccaaagtatgggctacagaaaccgtgccaaaagacttctacagagtgaacccgaaaatccttccttg

SEQ ID NO: 1583 - DNA, 738 bp, Homo sapiens
  full length sequence of bloodCirc_05579
gagactaatgagcaaaaacttcacaaaatagccaatgaacttttgcttactgaaagagcttatgtcaaccgacttgacctcttagatcaggtattttattgcaaactgttggaagaagcaaaccgaggctcgtttccagcagagatggtgaataaaatcttttctaatatttcatcaataaatgccttccatagtaaattcctcttgccagagctggagaaacgaatgcaagaatgggaaactactcctagaattggagacatccttcagaaattggcaccattccttaagatgtatggagaatatgtgaaaggatttgataatgcaatggaattggttaaaaacatgacagaacgtattccccagttcaaatcagtggttgaagaaattcagaaacagaaaatctgtgggagcttaactttgcagcatcacatgctagaacctgttcagcggattccccggtatgagatgctccttaaggactatctaaggaaattgcctcctgattccctggactggaatgatgctaaaaaatcacttgaaattatatctacagcagcaagccattctaatagtgcaataaggaaaatggagaacctaaagaaactcttagagatttatgaaatgttgggagaagaagaagacattgtaaacccttcaaatgaactaataaaagaaggacagatcctcaaactagctgctcggaacacttcagcacaagaacgctaccttttctta

SEQ ID NO: 1584 - DNA, 7959 bp, Homo sapiens
  full length sequence of bloodCirc_01085
tcctggaacgttctccccatgacctgctgcataaatgggctgtttcttctgcaagctcagctggaatgttaccgcttcagagaccttcttggaaccccccaactcaggttgaacacatacaacccagttcaagtacctcttgtaatcacccttttaaagtgatcttttctgttctctgtctctccccatcagaatgcaggaatcttctgtcttcccccatttgtggttccaaaagccccatttgtttgcttctgtatgaaccctaactcagtatccatatagacatctgttaaatatcagaaaattaaatatactatttggctggggcttagagcctaggaaaaagtccctcctgcctccaagaggaaggttctttaaagagctatgctcaggatggtctttctgttgtacctaaaaagctagggcagcagcagctgagggccagaaaggatctgtctcccctgtttatgttgactctgcagggcttccagtacttcagtcttgcatctcactgatcattaaaacgttcattttgaaggagggtgatgggattagggagcagtggtgttaagaagaaaacgaaaggacttttttttctttttaaagattaatgtttagaataggcttagtactagaagtacatacagcctgggcatcataaggagagcccacctctacagaatattaaaaacaaaaaattagccaggtgtgatgttgcatgcctgtggtcccagctacttgggaggctgaagggcgtgaagggggaggatcactggagcccccatggtcaaggctgcagtgagccctaatcataccactgcactccagcttgggtgacagagtgagacccggtctcaaacacacacacacacacacacacacacacacagacacacacacacacacagaaaaaaaaaaaaaacctggaagttgaagaagataatgaaagcaatttgaaatagaggaacatagaattataaaatgaatagggtgcaacatggaagataacaaaactaaaaatgaagagaaggaaaaataaggttaagtttgaggttgatagggttaaatcaagacaggtatgaaacctagagaaagtaaaaatgagaactcacgatgctaggcagagagaatacatgaattaaaataaacattcaatttttggagcaactcactctcacaaagataaggttttgtaagcaggtggtgctgtgcatgggagacctgccctctcaaaggtagttgccaaatggttccagatagcagaaggaaacatgtgtcaaatttcaggccagtctcattcattcctccagaagaggagctgcttttttggacaaaacccccgatctcctgttgtgtgtggtctcttctgcctatttcaggtgttttccttattttcaatgaaagaagccaagaccagtaagttcttattgcttcttagtttcctcactcggcatactacaatgcaaaaagagcagtccatatctggtcacctgccaggataccagaagactgggagataggcagcacaagaaatggctaaatcttctttctccattgttctgtagaatgattattttcaatatgaaattgattacaatatattcttcacattgttttgtgtttgacagcagtggactttgagtaccaaatttttttcaaatagctactatgagggacatattgtgctgggtgttgtggccacatggatgaatggagtcggccttgttaactattaaactcaaaaacacgtgataattacctgagagatccatgcaggggagagtccaggggaaggtgactgatcactgcttcccagggggaggcagaaaatgcttcttggaggagatgatgggtggattaaagaagacaagagctgagcaggagttgtagctaccggccagggaggaagggtattcagagcagaggaagcaaggtgagcaaaggcaccaagatgtgacactgctggactgccaagctattcagtgtggcagagtagggtaaaggagacaacaaagaagggagaggaataaatcacagggtgagcagttctaaaaagcaacaggcttgtcaggaataaacaatcaccatcgtaaactcagactttggtattattccctgtccttttagggcagcttgagcccttttgtttgacttagcacaacgtgactccaaactagggttgttttaatttcccgagacacagtagtaggcaatttcttgaggacctaattgcagatagagtttgtcggtctcagcatgtgggagctccagatgaatggcagtaatgggaagcagtttggtagtggttcagcagtgtggcctgggaacctagttgactggcctgcctcctgggtctgccaacctaactggaatgtattcttgggttctgattgtgatgggatttaaaagtctctaagctatgttaggaagccttagacattatcctgaggtcattggagagccatcgaaaggtatctgtcttggaaaaaccttgattactctgtcatataaatactgctctggtaatgtgaaaaatgaattgaatgaaaggtggcaagataggtatggagacctatttagttatgtcgtggtaatccagataagaaatgatagtggcttgaatgaaaagtaaaggatacaactacatagaataaacgggcatttcagttgtggaaacataacttgtttggggggcgtgtgtgtgtatgtgtatgtgtgtgtagagtcaaaagtggctcttgggcctccctttgttgtttgagctagagtgacacattccaagtagagctgtgtggggaggcaattgaatatgtagttttggcaccccagctagagatctgggatggagagatacccagctaggaggcagctggttatcagtggtaatgaagtcacagaagtgtatatattctcccagggggacctgcagaatggaatcacaggaagtcctcctacagactcatcagggatattaccttggtatgagccagaggacaagctgaaaaccagagtggtttgctctcctaaaagccaaggagtgagaactcttcaggcagaagagagtgagggcagagtgatcagtagctctcacgttatcaagagggtaattcaaactattaaggaagagactgttaggaggagtttaacaaggaggaggccctttaatgactcagaaagtagttgaagtaattttcatagacctaaaaatgagtgggaagtgagaaataaaattgaaatatgtagatgtcagagtttatgttttgtggaagcaaaaaaggttttaaatagattggatagtgggagaaggagcaagatggtcaggtttcattgccatttcacttgtagtcaaataccatgaatttctggtaatactaatctgggcagggctgtgggtatgcgtgtacattagttaattttttgcaagcaggtgtgaatgtacagaagttgaacagttcagtggatgcagtgtagatttttttttttttttgagacagagtctcgctctgctgcccaggctggagtgcagtggtgcaatctcagctcactgcaacctctgccacctgggttcaagcaattcttctgcctcagcctcccgagtagctgggactacaggcgtgtgccactacacctggctaattttttgtatttttagtagaaatggggtttcaccatgttagccaggatggtctctatctcctgacctcgtgatccgcccgcctcggcctcccaaactgctgggattacagacgtgagccactgcacccggcccagtgtagataattcactttactaaaactcacctggaactttggggaaatttctgactgcacctatcttatgatataatggcacctactgttgaggtatagtattgtagcttaatattaattataatataaaatatctagaaaaaataagtcaagatactgtttttctgggggtaggcatgtttagtttgaaattttccataggaagaaagtcctctgaaaacgtattgccaataagtgcattgcaggacatgatatataaagaaaatattggacagtatatatatggagaattttagaatttagaatatgacatgaaatgaaggtgagatttcacttggttagaattttcttgaccagtctctcaacctgaggcaggaccatgaccagggagtaagaaaagaaatgctccttggagatcaaaatagatctatctactttggtccttccactatagaagaggcctttgcattctgttggccctttaggcttttacttgatgtctccatcatcttattttgcaagcccacagataatttgaggaagatgagttgccgcagtagaaatgatagggagaaaaaaaaaactacaaaaaacagaaataaaaaattctaaaaccacagcaatatagtagctttattataggacatgctggataaacaatccaacagctacctcagggagcttctgagagaatgcatgatgcaatgatcagtgaggcaagatcaaattgtgtttgatgttcaagaaaggaaaaacaattcatgtaagtctatccaaagtagtaaatgttttatatttaagtagtgtatattcacttgtcagatgctcagttcacttatctgaaacctatgaaataaagtcttatattttagaatatttgagttcatatttattttaatctatgaaatccactacatttacttaataatcacctcttaccataacatttcttgagcacccacaaggtgggtagagtgtagtagaaaaagaagaacatggtccttgacccccaggaacttgccttttaagagaagacagcctgaagtgacaagctgttataagttagtgttttaaactatggaagaacaatctgagcagagtgctctatactgtagatgacttcttagaggagaagttacttttgaaatgaatttagaaaaatgtggagaaagatgcatccatatatattttaagaccaaagacattaatgctgtctcttcagtttattgtcgaatgtttattcccaaacaaaccaaaagctaataggatgttacttaaaacatgcaaatcccatttcctccactactaccagcactcaggtaaaagcatggaacagtcatttaaaatcttgccaagggccttcctattttttctgtactacctgctgccagaccacagtccatggctgatgaaagtgatatcagtacttcatcttcatgttcctattctcttatccctagatgcctatgaggagccaccaacatttgaagctatggagctcattggtaaaccaaaaccctactatgagattggggaacaagtagattataagtgtaaaaaaggacacttctacgtacctcctcttgccacccatactatttgtgatcggaatcacacatggctacctgtctcagatgagccctgttatagtaaataaactagccttttttttttgttttctgcttgctctagagatttgcacacattttagggtacatattccactatggagatgatgatttttttttcttgtgaaatgaggtttaagatagcaatgcatttttgcagactttgagaaattgaaatctccaagaaatctttttcttggcaatagattgcctgggtgaacatgaaactgaaatttgcccttataataggtaaagaaagaaaataatatgcccatgcattcaaaaccgcaatgcagaattttgaccttgattccaatctgtttagaaactggattgaaaaaatctcaaaattattttcttttaggaaaaacatgtccatgtataggtgatcctttacatggccaagcagtccttgcaaatgggacttatgagctaggttatcagatacactttatttgtaatgaggggtaagtaagttcctccttagaggaaataaggaaaatgttagtaattttattttcgttttgcttctcttcttaagctttcatataaactttatttaattttgctttctatgtgacaagttatacttctagccaaacaactcttggatgttttatggagacagcaaagacgtagagtaaatagaaattgatattgaaggaaagcataactacttgctatttctgacaataagtctgttgaaagcattaagagtgtagtaatcatgagaattcatccttcacaactgagtgtcccctatttaaatctgcaaactcttagagttaaagtagggctcacagaaatgagaaatagaattgccaactaaaaatatgcttgtatccagatgactctgtaaagtgtgacctggttagcctttaccatcatgttgaacaaaagctctcagttgaaaaaccttatttctgagactgctacaatgtgaagcatctcaagaacaggcactgagcactcggtaatagcctttgttctgcaggacttttaaagtcatagatattggggatactggacatttaagtgaaatgtgcttttagagagtaaatgtaattttcatagattttctattgctataacacaatacgtgagactagataattcataaagaaaagaatttatttggctcatatttctggaggctggggaattcaagggcatggcagtagtacctggcaagggctttcatgctgcatcagaacatgctggaaagtgaaagggaaattcagcacttgcaaaaaagacaaagcacaagggaggggctctcgctttataacaacctgctcttgtggtaacgaatccaagcctacaagaatgaagatccactccctcaagaattaatgaagaccctctagaaaggcattatccctcttaatgccctaatcatttctgaaaggccccatcacctctcactgctgttacactggcaattaaatttcaataagagttttggtagagacaaaccagattcaaacaatagcaataatacactataatatataaacaaagtgagtcttggaggaaaagtgcactgtgaccatgtaaggcagtttcactaagagtttttaaaatttggtcaagtagaaatattggagtattcaattaatagttacatagagcttgctaggcactatgagggataccaaaagtttaagacatggaccctcctaaaagaagttctaaccttattgagaaacaatatatactgagaggtatcaaaccaaaatactaaatgagaaataccaaataatagaattaatcatgttattacactaagagtccagaaggaggagagattcctgtgaatttaaatcagggaagatttcactgagtataggtgtatactcaatgaaagtattcctatactcaatgagctactcctagaaagacattctgttctaaataatattaataggagctaaaactcgtgtagcactcactatgtgccaaatgctaacttatctaatctcctaaacaaccccacgagctatgtactgttatccccttttaatcaattaggtaactgagtgagaggaactttaagtgatttacccaagctcaagaaactagtaagttgggaagcagagactctaatccaggcattccagctctagggcctgttctctctacagtcttgtccttactgagcaaagtcgtgtgagaaaacgcacagaaatgaatgtgtaatgtgattgcaggaggcagcaaagaggctgggtggaacggcacagcagatttatttagatgtttttgctctcggccaatatacgttcaaatagagaaactctttatttgattaaattgcagatttatttagcactttcattatatagtatgttgtttaagaaaccacccccctcaaattactgcagcgtagaaaataaaccatataaaaagttccttcattattatgtgtcttattaattgctatacaaaacagtaaccctttcttttcccatttagttattacttaattggtaaagaaattctatattgtgaacttaaaggatcagtagcagtttggagcagtaagcccccaatatgtgaaa

SEQ ID NO: 1585 - DNA, 305 bp, Homo sapiens
  full length sequence of bloodCirc_02595
gtgaccaagtcagccatcggggtgctctaactgggggttattatgacacaaggaagtctcgacttgaattgcaaaaagatgttagaaaagcagaagaagaactaggtgaacttgaagcaaagctcaatgaaaacctgcgcagaaatattgaaaggattaataatgaaattgatcagttgatgaaccaaatgcaacagatcgagacccagcaaaggaaatttaaagcatctagagatagcatattatcagaaatgaagatgctaaaagagaagaggcagcagtcagagaaaaccttcatgcctaag

SEQ ID NO: 1586 - DNA, 281 bp, Homo sapiens
  full length sequence of bloodCirc_06256
aatcgcatgtgtgagtgcccctagtgtttaccagaaactcagagagctgtgcagagaaaacttttcgatatacatctttgaatatgacaaaagatttgccatgtatggagaggagtttattttctatgattacaataatccattggacttacccgaaagaattgctgcacatagttttgacatcgtaatagcagatcctccctatctttcggaggaatgtctcagaaaaacatcggaaaccgtcaagtacctgacgcggggcaagattctgctgtgcacag

SEQ ID NO: 1587 - DNA, 42 bp, Homo sapiens
  full length sequence of bloodCirc_04491
ataggaaaagagtccaggagccagtgcgatttggtgaaggaa

SEQ ID NO: 1588 - DNA, 465 bp, Homo sapiens
  full length sequence of bloodCirc_21280
gcagacaccacccatcctttaaccaagcacagaaaaatagcctcttcttttcgcgattcatcattatttgatatcttcacactttcctgcaatttactaaaacaggcttcaggaaagaatctaaacttgaatgatgaaagtcagcatggcttgctcatgcaactgctcaagctcactcataactgcctcaactttgacttcatcggcacttccactgatgagtcctcagacgacctgtgtacagtgcagattcccaccagctggagatcagccttcttagattcttcaaccttgcagctgttttttgacctgtatcattccatccctccttcattttcacctctggtattatcctgcttggtacagatcgcttcagtcagaagatccctgtttaacaatgcagagagggccaagtttctctctcatcttgttgatggtgttaaacgaatactggaaaacccacag

SEQ ID NO: 1589 - DNA, 285 bp, Homo sapiens
  full length sequence of bloodCirc_19230
ccaccaaaaaagacagccaaaagagaaaaacctaaacagaaagctacttctaaaagtaaaaaatctgtgaaaagtgccaatgttaagaaagcagatagcagcaccaccaagaagaatcaaaacagttccaaaaaagaaagtgagtctgaggatagttcagatgatgaacctttaattaaaaagttgaagaaaccccctacagatgaagagttaaaggaaacaataaagaaattactggccagtgctaacttggaagaagtcacaatgaaacagatttgcaaaaag

SEQ ID NO: 1590 - DNA, 146 bp, Homo sapiens
  full length sequence of bloodCirc_02255
gatcaagcagaacaattctttagaagtggccatacaaacaactgggctgttctggtgtgtacatcccgattctggtttaattatcgacatgttgcaaataccctttctgtttatagaagtgtcaagaggctaggtattcctgacag

SEQ ID NO: 1591 - DNA, 128 bp, Homo sapiens
  full length sequence of bloodCirc_10689
ataccaaacttgccagtagggagaagggaaagttttgctttaaggcaataagatgtgagaaagaagaagcggccacacagtcctctgaaaaatatacctttgcagatatcatctttggaaatgaacag

SEQ ID NO: 1592 - DNA, 3376 bp, Homo sapiens
  full length sequence of bloodCirc_08145
cttacagcacttagaaattgttgatggccggtatctcttaagtaagaatagcctagggaaattttggataccagtttaattcttgaacaagacagcttggtaaggacattgtaattcacttgactaaggtgaaatttgtaaatttcaagacataaccttatagaagaaaattcattcttcatcaaaatatgtcaaaatagtcacaccctaaagactgtctaaatagaaggcttatatttctgattgtgtcaaactcagaataaaattttaaaattttcagtgaatgcttacattgcccccgttattatatgtagtagtttatggtttaaatctcttagtaaaatgtatgccccttggaattatgtcctattcatctctgtttgtccaaaatattttatcctctggaaattcagtaaatcggcaccgagtaaatgaggaaaatggtgagggggtgatattgttgactaagggaactttagggaggttgaggcaccaatttgaaaatgttgtaagtggtactatttaaactaattcagcaaaattacatcccccattagtatttcctacctaaaaaccaacttgcttagatagagctttgaaatacttagaagtgtcttcaacctctgctgtccaagaacctcatctcttctttatttttcctcagttcttcaattattttagttgtcattttagtttccagtatcatttatgtttccttaccaaaactctgcttaataagagttgcactttaaaggagaacctaaaacatcagccagtctcaagtgatgggataaaataaagaggctaggccaggcacggtggctcacgcctgtaatcccaactcttttggaggccaaggcaggtagatcagctgagctcaggagttcgagaccagcctggcccacgtggtgaaaccccatctctactaaaaaaatacaaaacttagctaggcgtggtggtgcacatataaacctggctgctcgggaggctgaggcaggagaatcgcttgaacccaggaggtggaagttgcagtgagctgagattgcgtcattgtactccagcctagacaacaagagtgaaattccatctcaaaaaaaaataataataaagaggctaatttggaccacaagatataaaacagaatttactgagttcaatacatgattatgaaatccatacccaggaactttggatgatttcataatatctattactgtctgtctcaatgaaccaagtatcctaagtgctttatgtgaaaaattggaacagaaccaagaaaagcttttacttggggagccatttatcaagggaaaaaaatagtaaactttatagtatgaaaattttgattatccttaaatttttacttcaattttgggatactaaggaaagatgaaatgttcaggccttttttttcccctggcttcctggagatggcagtagaatacatacagaaattaaactggttttaggacttggttttatagatagagtagttttatcaaagaaaatctcccaaagtatttgctttttagaaataatacatatttaaaattttttttaaatatatggaattaactcttacccatttctaatccagaaatgtgatcctttttctcagtcaacttttttcagttctgctgtaaactagctatgtgtccttgagcaaatttcattcattctttttttaaaagagacaagagtcttgctgtgttgcccaggcaggagtgcagtagcacgatcatagcttactgcttccttgaacttctgggctcaagtgatcctcccacctcagcctcctgagtaactagaactgtaagcatgtgccccatgcccagctaattttttttttttttaattttttgtagaggcagggtcttgctgtttcatccaggctaatcctgaactcctggccttaagtaatcttcccacctcagcctcccaaaatgctgggattataggcatgagccactgcacccagcctgagcaaatttctttatctcgacctcctatttgctctgaagttatgagagactaaatcatatgcagataaccatttgcaaaattacatagtaaaatgctttattggtaaaatcctaatcacatttaattttgtttttaattgagaagacacactggaggccttacctactgaaagtatggtccctggaacaatagcttgttattaatgtaaaatcttgggctccaccccagattctacattttaacaagatcaccagatttctcacatgcacgtagttcaagggcaaatcacatgaaacagcacttactgttgataagaaaaatattagtggatttgaattgttcttaccaccaccattgtaccaagcccactctttgccactttgtaaaaatcaagaattaagaaatactgatgaaatattttcaaatctgtaaatggtgacacagtataatgtcagaagtactaattagccttataagttcaagttaagtaccttaaatcatgtgtttctctttctgcaactggaaatagactcctgttaagagtagagttttctttgaagataatgagatagcataagcacagtgaacaacatgtatttctttgcttacgctcccttaggccagtaataggtacagtcattttacttatgtagtgtcctgaccagtgaatttggatggataatttgtcagatacttcgtgtctgaaataaagccgttaaattgaagataatgacaaacaggtgttaatgtaggcattagtgctctttcatttgtagaatgaaacgagctgctcagagtatttgagcctaagacaatgtgactcatgctttaaaggagaaaaaaattctaccttttttatcctcttgaaaatgactagtatataaaaaagtcagtgcttcccagcatctggctttgagcctttgggcaactatgtatgataggctttgttgcaaggagtctgctgtcagtcacattccctgaccaaaatcaaaccttgcctatgtggggaggtatgttgattttggtcacaaatgggaatggtgaggagagatctctttcatccatccaccttttggcaccaaacattcttctattcatcaggcctgaatgtatccatcttacagtgtgaatcctgctgtaattgaaaggatgaaataagattacctgaaagcattttgaaagtggcaaagctgtataggcaaatgtatttgctattaatagtaaattaatagagctttgaaaaagtataattttgcattgcagcaatttccagtttatgtactaccaaaagtagagtatcaagcttgttatggagttgaagctctgactgaaagtgaactttgtcgcttatggactgaaagtttattgcattccaacagctcattttatgttg

SEQ ID NO: 1593 - DNA, 434 bp, Homo sapiens
  full length sequence of bloodCirc_16950
cgaatgctgatgtcttaaaggcgatggtagcagataacagcctgtatgatcctgaaagccccgtgacccccagcacaccagggagcccgccagtgagtcctgggcctttgtcaccaggggggacgccagggaagcacgtctgtggccatcatctgcatacggtgggcggtgttgtcgagagggatgtgtgtcatcggtgtaggcacaagcggtggcactttataaagcccactaacaagtccagagagagcagaccacggcgccaaggcgaggtcacggtcctttctgttggcagatttagagttacaaaagtggagcacaagtcaaaccagaaggaacggagaagcctgatgtctgttagtggggctgaaaccgtcaatggggaggtgccggcaacacctgtgaagagagaacgcagtggcacagagtagcag

SEQ ID NO: 1594 - DNA, 623 bp, Homo sapiens
  full length sequence of bloodCirc_16304
gaatcatctgctgcagtttgctttagagtcaccagccaaatctcctgcttcttcctcttcaaagaatcttgctgtcaaagtatatactcctgtagcctccagacagtctttaaagcaggggagcaggttaatggataatttcttgatcagagaaatgagtggttctacatcagagttgttgataaaagaaaataaaagcaaattcagccctcaaaaagaggcgagccctgctgcaaagaccaaagagacacgttctgtagaagagatcgctccagatccctcagaggctaagcgtcctgagccaccctcgacatccactttgaaacaagttactaaagtggattgtcctgtttgcggggttaacattccagaaagtcacattaataagcatttagacagctgtttatcacgcgaagagaagaaggaaagcctcagaagttctgttcacaaaaggaagccgctgcccaaaactgtatataatttgctctctgatcgtgatttaaagaaaaagctaaaagagcatggattatctattcaaggaaataaacaacagctcattaaaaggcaccaagaatttgtacacatgtacaatgcccaatgcgatgctttgcatcctaaatcag

SEQ ID NO: 1595 - DNA, 303 bp, Homo sapiens
  full length sequence of bloodCirc_16003
ataatagatgccactcaaaaaggaaattgctctcgtttcatgaatcacagctgtgaaccaaattgtgaaacccaaaaatggactgtgaacggacaactgagggttgggttttttaccaccaaactggttccttcaggctcagagttaacgtttgactatcagttccagagatatggaaaagaagcccagaaatgtttctgcggatcagccaattgccggggttacctgggaggagaaaacagagtcagcatcagagcagcaggagggaaaatgaagaaggaacgatctcgtaagaaggattca

SEQ ID NO: 1596 - DNA, 236 bp, Homo sapiens
  full length sequence of bloodCirc_23019
gctggaagtgatggagagagtattggaaactgtcccttttgccaacgccttttcatgatcctctggcttaaaggagttaaatttaatgtgacaactgttgacatgaccagaaagcctgaagaactaaaggacttagccccaggtaccaatcctccgttcctggtgtataacaaggagttgaaaacagacttcattaaaattgaggagtttttagaacaaaccctggctcctccaag

SEQ ID NO: 1597 - DNA, 7306 bp, Homo sapiens
  full length sequence of bloodCirc_20241
gttcctcaagccaggacctacgcacctgttgtgagtggtgttatagttctgcagggcgcacaggtgcatccccatgggcacatttaatttaggtgagtaaaatggagctgtaagtggctgagatcattttctgtaaggtgcattcatcttcatggtcaagtgtgtggcacccaactactgcagcatccagcaagagttccctgtaacactgagagcaaaggggagcctaatcaatatgccccgttggatttttaagtatatttaaatatttcagagataccattataacaagccacatggaatgaagttaactaaaaatgtgtttataactaattcaggaggaggaaggttcagaggagaccaggagggagtgtgggatctagagaacaaggggatagaacagcttttgtggaaggggagggtggctaactcttcctccggtgaaaacgtcagaccgtgtaaggcagacagggctacatgcccagctcaggagctccagtcactgtgtttgatgcatgtgcaccaaggctgggacactgggtgaatagaggatagcggcgatcgggacattgcgagtgccgtcctcatagctcagaagtcatagcatgtcttaatcatggccatatcctcagtgcctggcccatagtaggtgtcctttaagtgattatgaactgagttgctggtaggagctggaggattagggaacactctggaggcgataggtgataatagttgaacttgctgcctgagggcagtggttcctaaacattgaactgtgcagctgaatcacctagggggcttgttcatacttccattctggaattgcgcatccagtagatttgagtgggactcaataaattacatttgttacaggttaccctgtagtactaagctgctgggcccacactttgagaaagaattactactgttggaggcaaggaagaagccactcagtattctaaagcaatgggacatggagggatagaccttagcttgctaagggtcaccagcccacatggttgtggaattttctgtagctgagctcaataggctcacaaaggcagttgattagattaagatcatagaggtttgtggctgggtgcggcggctcatacctgtaatcccagcactttgggaggctgaggcaggcagatcacaagaccagggatcgagaccatcctggctaacacagtgaaaccccatctctactaaaaatacaaaaaaaaaaaaaaaaatagccgagtgtggtggtcggtgcctgtagtcccagctacttgggaggctgaggcaggagaatggtgtgaacctgggaggcggagcttacaatgagccaaaattgcatcactgcactccagcctgggcaacagagcaagactctgtctcaaaaaaacaaaacaaaacaaaaaaacaaaagtcatagaggtttgttgaagggccctacagaagggaaattggagacttcttacaaaagagtagtggaagatttgtcttggggcttatactgtatagggaagaaagaaacctggtggagattggagattcaaggtcatggtttagtatatttctaaccttttcgtctgtagccaccttagtaagaaacacattttacattgtgacccagtaataaatgtatgtataactgagatagaaggttcataacacctttcttgtttgcagtccatgctgggattcctatttcttaaaaaaaaaaatagtatgggtcatggctcagtatattgacttcatgaatagttaggccacaccactgatttgaaagcattgctggtagagatggtttggattagatgatgagaatcagaaagggagaccactggggaatactgtgtattgattgataggtgggaagaagggcaggtgccagaggaacagcagtctgggtggtgaccaggcacttcttggtgtgctcaggaggtgggttgctgaagttgcatggagaggattactggtgcaaaggccagtgggctttcaggcccactgttagcttgtgtccatggtcatcaaagccccttaaagttatgttgtgaatttgaggtggtgaaagcagccctggaatgggttgtgtcctagatgcattacatcggttctaatggactcccccttctgcagaatgccttgatagactagttaatagattgaaaatctggtcttccccatcatatcccaatgaacaagcaatgtataaactgggaaaatgctgggcttgtagggagtcggtgggaggggggacagaccgtggctggagtgcagtggcacgctcaacgcacactgcagcctcaacccttcggctcaagcgatcctcctacatcagcttcttgagtaactgagactatatgcacacatcaccacactcagctaatttttatattttttttgtagagatagggttttatcacgttgtccaggctggtctcaaactcctggggtcaagcaatccaccggcctcagcctcccagagtgctgggattacaggcatgagccaccacaccgggctaataagttattttttaggagaataagcatgataacaaagtcaatattaatctgaaaacttaaaataattctgtaaacagtgcctattttgcagtaatcatgaggtataagattgagtcaacacccctgaaagtacaccttctgtagtgaaaataccagctgagaaactcactgtgccattttatcattggaaaaaataatacaatgctgttccctgataaaagctcagaagaattttttaaaataatttttatttttaaaagttaaggtgggttttggtttggaggaagagtatttgacagttaattgtaggaattgagatactgccttttaaaccatttatagtaatttatgtcattaaatgagtgatttgtgtttgaggataaacacacatctgagtatgggctacttttccatttatttgggatcactcctgtgtagttttcatgtaacatttttccaaagagttgatctggagtgtgagattatcttcagcaagcgagtaacagtgtttccagacctgaatttgctaaggacaaaagccaaagtaaatatatgaagttattgagagaaaaaggttaaaggtgatcacagtagagatcaccaatgcctttttgtggttgcaaacaaactagaaaaacctaaccaaaagatctgaactacgtctccagaagacactccttaaagccagaaattacaactggaactgagaacacttgaaaatgagcggtggggtttatttatgaagattcattagcatttaatgctgacttgtcaagatttcaacactagttaataatagcactttttaatggaaatggcaaaaaacagcatgttagcaaatatagccttcctatcccttctggattagttaaataattaatgacctcaccttggcgggagagccccagggaggagagacccaagggaaacgtagtttttctccagtgccacttctgctaatgaacagtacctttctcctagggccagtctgattgaaaatccagtttccaccctggaggaatacgttttaaattctggtatcccagtttactattcatgaaaacaacagttggctgtcaacctgcgatgtgattttggttagactacattgtctgttaccggaatgattacttatgttttcaagtgaaatgttaatttagcctgtcaaatagtgtatgcccattgtgatacaaataaggagctcttctctcactccgtttttgcacttgatctcatgctgtcttgtttaatgtgtgtaactttcttttctgttcaaatgtggcttcctgaatttcacgggaaactcctgaggctcttttcccccgtcccttcactcccgcaagtcaggttgtcgagacttggccagtgccagttcagaggactgtctgatccaggggttcctggttgcccagtgcttggggagcttatcccatgtatcatacttagcccctctttcactatttttagtccagttctactacacaaaatgttgcaaaaatctttttaattatattatttccttttttctttgtaactcttgcccatatctttagggagaaaatgatcgctttctttcctttctttccatttgtaagcaaaacaaaaaccccacaaacccttatcctacccacataagggtataaaaagcccactggagtccttagaagtaccttgcaaaagcccttaagaagtttgttcccttctttctttctaattaaatttcatttctttaagcagtagcattcagtgtaaataacagtttgttttttttttactccttctaatttttcagtttcaataacatgagaggagttttcttcttgctatttttgttacctgaagtagttctgctgtattttgagttaaattctcctttacaggctagcatatataacatggtttcttttcaacacaattcattttaaatttgtggaattcttaaactattgtattcctatatcacaggcaagcctgtgattaggtaccaataaatactaattgaattgtttcttaatttctgttgaactgtgttttgtatttcatttgtataaaattgagatcttttgtagtatctaaatggctaagagtgacctttggagatctacgctttaatttcgttcatttgttcagaaatctcaatgtttacaatgtgtcggctggccctgtgctggcttcagtggagtgttcactaaatgaatatcattccaaataacttaataaaacagtagctatgagaatgacttttaaggaatgggtactaccttagggtggtcttgaaggtttctctgtgaaactaacatttgagctcagatcagaatgacaaagatgagtcatatattcagagatgggggcagtgggggttgctagagtaaaggggccaaggcaggcaggaactccaggagcagaagggatgtgactggagcctcaggatgggttgtcgggggctgttggcggatgaggtcagagtggtaaccagagcagggatggcctggtgtttgtgggccacggttagaagctgggaatttagggcaggcgcggtggctcacgcctgtcatcccagcactttgggaggccgaggcgggtggatcatgaggtcaggagttcgagaccagcctgaccaatgtggtgaaaccctgtctctactaaaaatacaaaaaaaattagtcaggtgtggtggcgcgtgcctgtaatcccagctactcaggagggctgaggcaggagaatcgcctcaacccgggaggcagaggttgcagtgagccaagattgcaccactgcactccagcctgggtgacacagcaagactccgtctcaaaaaaaaaaaaaaaaaatgttgagaatttattctaattgcaatgaggattggaagcagagaagtagcgtttaattttcaaatgctcatgtaggttgctttgtagagaataatttcaggtattagtaattctagagacattttgaactgtattgggctgcggataaggagtaaataggtctaccaacttgtggcctttccttctcagcaacccctactttttttctttttttttttttataagacagagtctcactctgttgcccagagtggagtgcagtggcgccatctcagctcactgcaacctccgcctcctgggttcaaactatcctcctgcctcagcctcctgagtagctgggatcgcaggtgcccatcaccacgcttgggtaactttttttgtatttttagtagagacaggaccaaccatgttggccaggctggtctcgaactccagacctcaggtgatccacccgcttcagcctcccaaagtgctggaattacaagcatgagccaccacacccggccagcaaccactacttttaagccaactttttaataatttaaattttaaggaatgcctttggtgtgaaaacattgtgcaactatacctatccatagtttggaggagaaacaagcataaattaaacccagtagtgtaagatgggtgttaccatgcctctccttcactctcactgcacgtcctgttgtgatggagttaagtatgccaggcatatacagcatgtgtgtaataatgctccaaggatgcaagagagaaggaagggtttggaggtgaaattagggagagaccacttcctcattcctggtgataaagtcatctgaactatgcatctcatgcgatttcttcacagggcatgtaccctgttctaaagtcctccagtagacattttaggtagcagaagagtgagaagctaaggctctagttgttgatttattaacatacaagttcaattattggcgattttgtgaaatccataacatttcttaatttctagatactgctaggcctttcatactgaatgacataggatttctagcttcaaaggagtttttaagataaagacttatgttacatattttcagattaccctttttttttttttgacacagggtcttgctctgtcgcccaggcttgagtgcagtggtgcaatcttggcccactgcagcctctgcctcctgggggcaagcaattctattatctcagcctcccaagtagctgggattacaggtgcccgccaccacacccagctaatttttgttaattttagtagagacgggatttcgccatgttggccaggctggtctcaaactcctgacctcaggtgatccgtctgcctcagcctcccaaagtgctgggattacaggcgtgagccatggtgcctggccggattactctttttaaaagctgtacttggtaacacttctaaccgtcatatatgaatgaatacaacgaaactaatcattttaattttcatattaaaattaaatagcaagattccaagaatactagaggaaattagcttactttaaaccttttagattatctttaacagaatatctgatgtgcttgttggtcagtaatatttgttaatgtcacagacatgtttactttgtaatagcttaattgcataatatcctcatataaagcaaattaatgaaatttatttcattttttgaaattgctcacatgctaattaaatgaatgttttctgaccctgataccttcagtgtcttcatctattaatggttttttaataaaacagcaaaattaaaaatttttaccttcatatgccaacacacactaagctcttgttctcttttatagggaaatcctcattgacgattcaatttgttgaaggccaatttgtggactcctacgatccaaccatagaaaacacttttacaaagttgatcacagtaaatggacaagaatatcatcttcaacttgtagacacagccgggcaa

SEQ ID NO: 1598 - DNA, 171 bp, Homo sapiens
  full length sequence of bloodCirc_12807
caggacagaaggagcaagctgtggaatggtataagaaaggtattgaagaactggaaaaaggaatagctgttatagttacaggacaaggtgaacagtgtgaaagagctagacgccttcaagctaaaatgatgactaatttggttatggccaaggaccgcttacaacttctag

SEQ ID NO: 1599 - DNA, 535 bp, Homo sapiens
  full length sequence of bloodCirc_23171
tttgcaggcctttcagatatatccatctcacaagacatccccgtagaaggagaaatcaccattcctatgagatctcgcatccgggagtttgacagctccacattaaatgaatctgttcgcaataccatcatgcgtgatctaaaagctgttgggaaaaaattcatgcatgttttgtacccaaggaaaagtaatactcttttgagagattgggatttgtggggccctttgatcctttgtgtgacactcgcattaatgctgcaaagagactctgcagatagtgaaaaagatggagggccccaatttgcagaggtgtttgtcattgtctggtttggtgcagttaccatcaccctcaactcaaaacttcttggagggaacatatctttttttcagagcctctgtgtgctgggttactgtatacttcccttgacagtagcaatgctgatttgccggctggtacttttggctgatccaggacctgtaaacttcatggttcggctttttgtggtgattgtgatgtttgcctggtctatagttg

SEQ ID NO: 1600 - DNA, 290 bp, Homo sapiens
  full length sequence of bloodCirc_12531
gacttccttcgctgggcatctggctgggattcttgttggactaatgtacactcaagggcctctgaagaaaatcatggaagcatgtgcaggcggtttttcctccagtgttggttacccaggacggcaatactactttaatagttcaggcagctctggatatcaggattattatccgcatggcaggccagatcactatgaagaagcacccaggaactatgacacgtacacagcaggactgagtgaagaagaacagctcgagagagcattacaagccagcctctgggaccgag

SEQ ID NO: 1601 - DNA, 181 bp, Homo sapiens
  full length sequence of bloodCirc_18517
atttgcatctgctggtgatgatggaattgtagttgtgtggaatgcccagacaggggaaaaacttttagaactgaatggacacactcaaaagataacagctattattacatttccttccttggaatcttgtgaagagaaaaatcaactcatcttgacagcctctgctgatagaacagttatt

SEQ ID NO: 1602 - DNA, 200 bp, Homo sapiens
  full length sequence of bloodCirc_15527
gctaaagaacgtgccaatggaatggagcttgatgggcgtaggatcagagttgatttctctataacaaaaagaccacatacgccaacaccaggaatttacatggggagacctacctatggcagctctcgccgtcgggattactatgacagaggatatgatcggggctatgatgatcgggactactatagcagatcatacag

SEQ ID NO: 1603 - DNA, 465 bp, Homo sapiens
  full length sequence of bloodCirc_15305
cttcaaaagcagtggactgtcttttggattcaaagtgggcaaaggccaagaaaggagaggaagctttatttacaaccagggagtctgtggttgactactgcaacaggcttttaaagaagcagttttttcaccgagccctaaaagtaatgaaaatgaaatatgataaagacataaagaaagaaaaagataaaggaaaagctgaaagtggaaaagaagaagataaaaagagcaagaaagaaaatataaaggatgagaagacaaaaaaagaaaaagagaaaaaaaaagatggtgaaaaggaagaatccaaaaaggaggaaactccaggaactcctaaaaagaaggaaactaagaaaaaattcaaacttgagccacatgatgatcaggtttttctggatggaaatgaggtgtatgtatggatctatgacccagttcactttaaaacatttgtcatgggattaattcttg

SEQ ID NO: 1604 - DNA, 268 bp, Homo sapiens
  full length sequence of bloodCirc_22668
tttaaggaagaaatctctaaacgttttaaatcacatactgaccaacttgtgttgatatttgctggaaaaattttgaaagatcaagataccttgagtcagcatggaattcatgatggacttactgttcaccttgtcattaaaacacaaaacaggcctcaggatcattcagctcagcaaacaaatacagctggaagcaatgttactacatcatcaactcctaatagtaactctacatctggttctgctactagcaacccttttggtttag

SEQ ID NO: 1605 - DNA, 505 bp, Homo sapiens
  full length sequence of bloodCirc_21527
gattaatttatttttggaaatcaagtgcaatattggaagccatttctactaattttatttcacttttaaatttatgatttgatttgaatactatcatgggaggagctgtgagtgctggggaagataatgatgacttaattgataatttaaaagaagctcagtatattcgtactgaaagagtggagcaagccttcagagcgattgatcgtggagattactatttggaaggctacagagacaatgcttacaaagacttagcctggaagcatggaaacatccacttgtcagcaccttgcatttattctgaagttatggaagcattgaaacttcaaccaggattgtcttttcttaacctgggaagtggaaccggatatttaagtacaatggtgggcttaattttaggtccttttggaataaatcatgggattgagcttcattcagatgtggtggaatatgccaaggaaaaactggagagcttcatcaaaaatagtgatagctttgataa

SEQ ID NO: 1606 - DNA, 451 bp, Homo sapiens
  full length sequence of bloodCirc_04781
gcccctagcagtcttcttgatgctttggaacaacatttagcttccttggaaggaaagaaaatcaaagattctacagctgcaagcagggcaactacactttccaatgcagtgtcttccctggcaagcactggtctatctctgaccaaagtggatgaaagggaaaagcaggcagcattagaggaagaacaggcacgtttgaaagctttaaaggaacagcgcctaaaagaacttgcaaagaaacctcatacctctttaacaactgcagcctctcctgtatccacctcagcaggagggataatgactgcaccagccattgacatattttctacccctagttcttctaacagcacatcaaagctgcccaatgatctgcttgatttgcagcagccaacttttcacccatctgtacatcctatgtcaactgcttctcaggtagcaagtacatggggag

SEQ ID NO: 1607 - DNA, 805 bp, Homo sapiens
  full length sequence of bloodCirc_15556
gttgcttgggagaccctacaagaagaattttcccgctttatgacagaaccgaaagggaaagagcatgatgacatatttgataaacttaaagaggctgttaaggaagaaagtattaaacgacacaagtggaatgactttgcggaggacagcttgagggttattcaacacaatgctttggaagaccgatccatatctgataaacagcaatgggatgcagctatttattttatggaagaggctctgcaggctcgtctcaaggatactgaaaatgcaattgaaaacatggtgggtccagactggaaaaagaggtggttatactggaagaatcggacccaagaacagtgtgttcacaatgaaaccaagaatgaattggagaagatgttgaaatgtaatgaggagcacccagcttatcttgcaagtgatgaaataaccacagtccggaagaaccttgaatcccgaggagtagaagtagatccaagcttgattaaggatacttggcatcaagtttatagaagacattttttaaaaacagctctaaaccattgtaacctttgtcgaagaggtttttattactaccaaaggcattttgtagattctgagttggaatgcaatgatgtggtcttgttttggcgtatacagcgcatgcttgctatcaccgcaaatactttaaggcaacaacttacaaatactgaagttaggcgattagagaaaaatgttaaagaggtattggaagattttgctgaagatggtgagaagaagattaaattgcttactggtaaacgcgttcaactggcggaagacctca

SEQ ID NO: 1608 - DNA, 1143 bp, Homo sapiens
  full length sequence of bloodCirc_16517
gcaagccaaattagagctgagagttgctgtagcaaaagtggaagagttaactaatgtgactgaagatctgcagggacagatgaaaaagaaggagaaggatgtggtgtctgcccatggaagagaggaagcatcagataggcgtttacagcagttacagtctagtataaaacaattagaaataagattatgtgtgacaatccaagaagccaaccaattaagaaccgaaaatacacatctggaaaaacagaccagagagctacaagcaaagtgcaatgaattagaaaatgagagatatgaggctattgtaagagccagaaatagcatgcaactcttagaagaagctaaccttcaaaaaagtcaggctctacttgaggagaagcaaaaagaagaagacatagagaaaatgaaagagacagtttctcggtttgtacaagatgctaccataagaaccaagaaagaagttgcaaacaccaaaaaacaatgtaatatacaaatttctcgattaacagaagaactttcagcccttcaaatggagtgtgctgaaaaacaaggccaaattgaacgagtcattaaggaaaaaaaagcagtggaagaagaactagaaaagatttaccgtgaaggcagaggaaatgagagtgattacagaaaactggaagaaatgcaccaaagattcctggtttcagagcgttcaaaagatgatcttcagctaagacttacgagagcagaaaatagaataaaacaacttgaaactgactcctcagaagaaatatcacgttaccaagaaatgattcagaaacttcaaaatgtattggagtctgagagagagaactgtgggcttgtcagtgaacaaaggctaaaacttcagcaagaaaataaacagttacggaaagagactgagagtttaaggaagattgccctggaggctcaaaaaaaagccaaagtaaagatcagtacaatggaacatgaattttcaataaaggaacgtggatttgaagttcaattgagagagatggaagacagtaatagaaattccattgttgaactgaggcatctcctagcgactcaacagaaggcagccaataggtggaaagaagaaacgaagaaacttactgaaagtgcagaaattagaatcaataatctaaa

SEQ ID NO: 1609 - DNA, 343 bp, Homo sapiens
  full length sequence of bloodCirc_08315
ctataatggatttccagttcttaggaacaatttatttgaaagacctgaaggatttctacaagcaaagaagaacaaattgccttcaaaatcaagtagtcctaatagccctttgcccatgttcagaagaacaaaacaggaaattaaatcagcccataaaattgcaaagaggtactcttccatccctcagatgtggtctaggtgtctactgcgccactgttatggactgtggtttatttgtctcccagcttatgtgaaagtctgtcattcaaaagtcagggctctgaaaacagcatatgatgtgcttaaaaaaatgcagtcaaagaagatggatccacctgatgag

SEQ ID NO: 1610 - DNA, 576 bp, Homo sapiens
  full length sequence of bloodCirc_19101
ttgtattccctgaatgactataaaccacccatttcgaaagcgaaaatgacccaaattactaaggcagccatcaaagctattaagttctataaacatgtggtacagagtgttgagaagtttattcagaaatgtaaaccagaatacaaagtacctggactttatgttattgactccattgtgcgacaatcccgacatcagtttggtcaagaaaaggatgtgtttgcacccagatttagtaataacatcattagcactttccagaatttatatcgttgccctggggatgacaagagtaaaatagtgagagtactaaacttatggcagaagaataatgtatttaagagtgagattattcagccccttttggatatggcagccgggattccgcctccagttgtcacacctgttttggccagcactaccactgctatgagcaatactccaggaactcctgtgacacctgttactccggccaatgtggtccaaggcttacctgatccgtgggtatctcagataacaaatacagatacacttgcggctgtagctcagatcttgcaaagtcctcaaggccagcag

SEQ ID NO: 1611 - DNA, 292 bp, Homo sapiens
  full length sequence of bloodCirc_21658
gcaagatcacgtctctggataccagcaccatgagagcagccatgaaaccaggctgggaggacctggtaagaaggtgtattcagaagttccatgcgcagcatgaaggagaatctgtgtcctatgctaagaggcatcatcatgaagtactgagacaaggattggcattcagtcaaatctatcgtttttccttgtctgatggcactcttgttgctgcacaaacgaagagcaaactcatccgttctcagactactaatgaacctcaacttgtaatatctttacatatgcttcacag

SEQ ID NO: 1612 - DNA, 375 bp, Homo sapiens
  full length sequence of bloodCirc_09532
gtgctgaggagtcatggaagagtttttaaaccaggtaaggaacatgtttagatcactatttaagtagaagtaactctgttgacagtatagaagttagactttaaaaggcacaattgattgtagggagactagttggttgggagaatggtgtgatgacttgagagattgacgaaatcaggtacagtagtcatggtggaattgtagactgattggagaactttttaggagagtaactaaaaggatctcattgactttatattggaggacgggtaaagaagaaggagttgtcaaagatggagttgaaattgctggcatggacaactaagtggaatgtgatgtcattaaccaagttacggaatacaagagtaaaagagg

SEQ ID NO: 1613 - DNA, 489 bp, Homo sapiens
  full length sequence of bloodCirc_16574
ttccaaagaactactggttcagattttagctcttcccaagttgtgaaaatagtgaaggatgcttagactacttaacatacaaactgctttctggttaatcatctttagaagactggatttctggatatctactccactccatctctattgacttttaaaacatgataatgcaaacctataacactggcaaccatcagtgaacctttaatttcattgattaatagcgtttgaagcttcctcagggaataacaatgacatcagcagtggttgacagtggaggtactattttggagctttccagcaatggagtagaaaatcaagaggaaagtgaaaaggtttctgaatatccagcagtgattgtggagccagttccaagtgccagattagagcagggctatgcagcccaggttctggtttatgatgatgagacttatatgatgcaagatgtggcagaagaacaagaagttgagaccgagaatgtggaaacag

SEQ ID NO: 1614 - DNA, 443 bp, Homo sapiens
  full length sequence of bloodCirc_18512
gatttgaactcagaggatcaaaaagccttcagtgttgaacatacaagctgcaatgaggaagaaaatttcgcaaatatgaaaaagaaggccaaaataggcattcatcacaaaaatagtccccccaaagtcactgttccaactagtggaaatactatagagtctcctcttcatgaaaacatctctaattcaacatcatttaaagatgagaaaatcatggagactgatagtgaaccagaggaaggtgaaattacagactctcagactgaggatagttatgacgaagccattaccagtgaaggcaatgtaactgcagaagatagtgaggatgaagatgaagacaaaatttggcccccatgtattagagtaattgtcattagatcacctgtgttgcagataggatcactctttatcattactgctgtaaaccctgctacaattggaag

SEQ ID NO: 1615 - DNA, 344 bp, Homo sapiens
  full length sequence of bloodCirc_14107
aggagtttaataaagaaactgggcagccccttgttggtatagaaacattaccaccggatttgagagattttgttgaggaagacaaccaacgatttgaaaaagaactagaagaatgggatgcacaacttgcccagaaagctttgcaggaaaagcttttagcgtctcagaaattgagagagtcagagacttctgtgacaacagcacaagcagcaggagacccagaatatctagagcagccatcaagaagtgatttctcaaagcacttgaaagaagaaactattcaaataattaccaaggcatcacatgagcatgaagataaaagtcctgaaacagttttgcagtcg

SEQ ID NO: 1616 - DNA, 362 bp, Homo sapiens
  full length sequence of bloodCirc_21420
gatattataccatttattgataaatactgggagtgcatgacaaccagacagagacctgggaaaatgacttggccaaataacattgttaaaacaatgagtaaagaaagagatgtattcttggtaaaggaacacccagatccaggcagtaaagatccagaagaagattaccccaaatttggacttttggatcaggaccttagtaacattggtcctgcttatgacaaccaaaaacagagcagtgctgtgtctactagtgggaatttaaatgggggaattgcagcaggaagcagcggaaaaggacgaggagccaagcgcaaacagcaggatggagggaccacagggaccaccaagaaggcccggag

SEQ ID NO: 1617 - DNA, 1570 bp, Homo sapiens
  full length sequence of bloodCirc_22434
gccacttggtcattctggcattttatggtagagaatacgttgagtttggctctggaaggaatatgaggtaatttgaacacatgttctttataaataatgaactgtgtgtacataatacagagtattttcagatgtcatatatggagtctcatgtctgaattttttcaatagtaattttcttttttcatattttgatgtttttcctttcttgatggttggcaatagttaatatggtgaagaactttattttctatcactactatatatgttttcaagaaaacagtattatttacatagttatgtgttttcagtttatatttttaaatgcttcagttaacctagctttcggtggtgctgtaaaaaccagaagagaattccttcctttccacctaccaacttcccatcccaaccaatcctgccccaggtaggattaaggtcatgctgcatttaaaagtcataactgccacacagagttttatagaggaacaataaagaaagagcactggaactccaataatgtaaaattttcaggcactactcagagtgctttgagagcacaaatatgagactcataggttagtcttttcctgtcctttgatacccatatgtgaccctgtgtgatgtatgggtttgtcattctaaaatggcagtcaaataagtgtatatgccacatatattttcatagtggtttcatagactaaacattaagcctatatcaaaggaagtttcaattaaaggtagaaaaataatagttgactttatgaaattaagccaatgatacagtagcaggcttatcagtagatattaagtatttggtagagtaattggttaatatactgctgatgtcataattcccctactctactactcaataatagttttgttatgtaggaagatgcagcagcttgtttgtgtgaacttctgcttccactacaaacagtactttaaagacaggccttccactgccattcagaaaggtgaaaaaagcaggagtcagggtggggtggataggtgggaagggtgtcagagggataggcatagtgtctgtgagtacttgtaagctgtcatcattggtctttgaggttatgtttgcatccaaattacttccttacctttccaaagagttgaaatgcaattgccagcccattgaggatgatcaaacattgctattttaatgtttcttaatttttaataaatgaagcttatattattaaaattggtattatttaaaaataatcatgtgatttacttttttttaagcatgtataatctggtaaatttttgaaaagtattaataatttatctttaaatactacactttaatttctaagttctaaaaattgtgttcatgttgtttcaatcaaagatgtgatgatgaaatagaatccatcagtcttcacagggaacaaggtactccttatttcaatttgatatatggtctttgttttagcagccatggaggatactctagtttctttgggaagataaacactcaatctgctagttaagagacaaagctcaagagaaataagctgaagctgtaacctccatttcaaacttgtggttctgc

SEQ ID NO: 1618 - DNA, 444 bp, Homo sapiens
  full length sequence of bloodCirc_03355
aaagagaaaaaagagaagccaaaatctgataagactgaagagatagcagaagaggaagaaactgttttccccaaagctaaacaagttaaaaagaaagcagagccttctgaagttgacatgaattctcctaaatccaaaaaggcaaaaaagaaagaggagccatctcaaaatgacatttctcctaaaaccaaaagtttgagaaagaaaaaggagcccattgaaaagaaagtggtttcttctaaaaccaaaaaagtgacaaaaaatgaggagccttctgaggaagaaatagatgctcctaagcccaagaagatgaagaaagaaaaggaaatgaatggagaaactagagagaaaagccccaaactgaagaatggatttcctcatcctgaaccggactgtaaccccagtgaagctgccagtgaagaaagtaacagtgagatagagcag

SEQ ID NO: 1619 - DNA, 402 bp, Homo sapiens
  full length sequence of bloodCirc_10521
ctgaagcatttgatttgattgcacaagatgaagaagaatttaataaagagcatcaatttatacaggaagaaaacatagatgctcataatacttcggttgcactgggcgatacgtcctggggagctacaattaattacagtctgttgaggaaatcacgtagcacatcagatttggataaagatgatgccagttatttacgtctgtctttaggagagttctttgctcaaagatctgaagctcttggttgccttggtggtggtaacaatgtgaaaagaccatcatttggctattttattagatcaccagagaagagagaacctattgccttaataagaaaatctgatgtatcaagaggtaatttggaaaaagaaatggctcatcttaaccatgatctatattcag

SEQ ID NO: 1620 - DNA, 435 bp, Homo sapiens
  full length sequence of bloodCirc_16492
aattcggttccctcaaaattataaaggcaggaaagctcaagacaaagaaatccaacaaggctagtgatttcagtgatatggagaattggccaacaccaagtgaattagtgaacactggatttcagagcgtcctcagccaaggaaataaaaagccacaaaatagaaaagaaaaagaagagaaggttgaaaagagaagtaacagtgacagcaaagaaaaccgggaaacaaaattaaatggtcctggtgaaaacgtcagtgaggatgaggctcagtcaagtaatcaacgtaagagagctaataagcacaagtgggtaccactccacttagatgttgtaagatcagagagtcaagaaagacctggatcccggaacagctcaagatgtcaacctgaagcaaataaaccaacacataacaataggagaaatgatacacgaa

SEQ ID NO: 1621 - DNA, 324 bp, Homo sapiens
  full length sequence of bloodCirc_20383
gtaataatagacgtggatggaatacaactagccagagatattccaatgtcatccagccatccagtttctccaaatccacaccatgggggggcagcagagatcaagaaaagccatatttcagttcttttgattctggagcttcaactaacaggaaggaaggctttggattgtctgagaacccatttgcttcacttagtcctgatgagcagaaagatgaaaagaaacttctggaaggaattgtaaaagatatggaggtttgggaatcatcagggcagtggatgttttctgtttattcaccagtgaaaaagaaacctaatatttcag

SEQ ID NO: 1622 - DNA, 353 bp, Homo sapiens
  full length sequence of bloodCirc_07724
gagaaattgtcgtaaatgaagtcaattttgtgagaaaatgcattgcaacagacacaagccagtacgatttgtggggaaagctgatatgcagtaacttcaaaatctcctttattacagatgacccaatgccattacagaaattccattacagaaaccttcttcttggtgaacacgatgtccctttaacatgtattgagcaaattgtcacagtaaacgaccacaagaggaagcagaaagtcctaggccccaaccagaaactgaaatttaatccaacagagttaattatttattgtaaagatttcagaattgtcagatttcgctttgatgaatcaggtcccgaaagtgctaaaaag

SEQ ID NO: 1623 - DNA, 402 bp, Homo sapiens
  full length sequence of bloodCirc_21531
gattaatttatttttggaaatcaagtgcaatattggaagccatttctactaattttatttcacttttaaatttatgatttgatttgaatactatcatgggaggagctgtgagtgctggggaagataatgatgacttaattgataatttaaaagaagctcagtatattcgtactgaaagagtggagcaagccttcagagcgattgatcgtggagattactatttggaaggctacagagacaatgcttacaaagacttagcctggaagcatggaaacatccacttgtcagcaccttgcatttattctgaagttatggaagcattgaaacttcaaccaggattgtcttttcttaacctgggaagtggaaccggatatttaagtacaatggtgggcttaattttag

SEQ ID NO: 1624 - DNA, 342 bp, Homo sapiens
  full length sequence of bloodCirc_07279
gggcaatgaaaactattctaggtgatcaacgaaaacagatgctccaaaaatacaaagaagaaaagcaacttcaaaaattgaaagagcagagagagaaagctaaacgaggaatatttaaagtgggtcgttatagacctgatatgccttgttttcttttatcaaaccagaatgctgtgaaagctgagccaaaaaaggctattccatcttctgtacggattacaaggtcaaaggccaaagaccaaatggagcagactaagattgataacgagagtgatgttcgagcaatccgacctggtccaagacaaacttctgaaaagaaagtgtcagacaaagagaaaaaag

SEQ ID NO: 1625 - DNA, 345 bp, Homo sapiens
  full length sequence of bloodCirc_19458
gtattttgattccgttcaagctaaagaacagcgaaggcaacagagattacgcttacatacgagctatgatgtagaaaacggagaattcctttgccccctttgtgaatgcttgagtaatactgttattcctctgctgcttcctccaagaaatatttttaacaacaggttaaatttttcagaccaaccaaatctgactcagtggattagaacaatatctcagcaaataaaagcattacagtttcttaggaaagaagaaagtactcctaataatgcctctacaaagaattcagaaaatgtggatgaattacagctccctgaagggttcaggcctgattttcgtcctaa

SEQ ID NO: 1626 - DNA, 190 bp, Homo sapiens
  full length sequence of bloodCirc_22716
attatctgcaattatgaaatgaagtaactcaagatgagcaagttaaaagtgataccagaaaaaagccttaccaataattctaggatcgtaggactcctggctcaactggagaagatcaatgctgagccttcagaatcagacactgcccgatatgttacatcaaaaattcttcatctggctcagagtcaag

SEQ ID NO: 1627 - DNA, 185 bp, Homo sapiens
  full length sequence of bloodCirc_13376
aacaaatagtggagaaagatgaaggtccatattatactcacttgggatctggccccacggtcgcctctatccgggaactcatggaggagcggtatggagagaaggggaaagccatccggatcgagaaggtcatctacacggggaaggagggaaagagctcccgcggttgccccattgcaaagtgg

SEQ ID NO: 1628 - DNA, 274 bp, Homo sapiens
  full length sequence of bloodCirc_09780
gctgttgaagccaaggaaaaacaagatgaacaagtcggacttcctgggaaaggggggaaggccaaggggaaaaaaacacaaatggctgaagttttgccttctccgcgtggtcaaagagtcattccacgaataaccatagaaatgaaagcagaggcagaaaagaaaaataaaaagaaaattaagaatgaaaatactgaaggaagccctcaagaagatggtgtggaactagaaggcctaaaacaaagattagaaaagaaacagaaaagagaaccag

SEQ ID NO: 1629 - DNA, 331 bp, Homo sapiens
  full length sequence of bloodCirc_20641
ggaaaaagacctcgatgaagttctgcagacccactcagtgtttgtaaatgtttctaaaggtcaggttgccaaaaaggaagatctcatcagtgcgtttggaacagatgaccaaactgaaatctgtaagcagattttgactaaaggagaagttcaagtatcagataaagaaagacacacacaactggagcagatgtttagggacattgcaactattgtggcagacaaatgtgtgaatcctgaaacaaagagaccatacaccgtgatccttattgagagagccatgaaggacatccactattcggtgaaaaccaacaagagtacaaaacagcag

SEQ ID NO: 1630 - DNA, 236 bp, Homo sapiens
  full length sequence of bloodCirc_13248
atcttagcaaagcaatgtctcaagatggtgcttctcagttccaagaagtcattcggcaagagctagaattatctgtgaagaaggaactagaaaaaatactcaccacagcatcatcacatgaatttgagcacaccaaaaaagacctggatggatttcggaagctatttcatagatttttgcaagaaaaggggccttctgtggattggggaaaaatccagagaccccctgaagattcg

SEQ ID NO: 1631 - DNA, 277 bp, Homo sapiens
  full length sequence of bloodCirc_02469
gctattcaggcagctatcagccaggcctttaaaaccccagaggtcatcagattgtttgcaaagaaacaaccaggtcagcttcggacaaggttagcagagatggatagagatctgatggtaggaaagctggaaagagacctgtacactcaacagaaagtggagatactaacagctcttaggaaacttggagagaagctgactgcagatgatgaggccttcttgtcagcaaatgcaggtgctatactcagccagtttgagaaagtctctacagaccttg

SEQ ID NO: 1632 - DNA, 14249 bp, Homo sapiens
  full length sequence of bloodCirc_03025
ttttcagtttaaattctcaactggcaattggccgaaaactcccatctgaagacatgatcatccaaatgtcattttgtgatttggctactgtctgcttgacataggaaagcactatcaagaaagactaatggagtgactatcaaaaggaagtcaatggtaagagttttcatttaaattgtgtgtgtgtgtgtgtgtgtgtgtaaagcctaccaatgtattatatttgaattaaaattttagaacttttaaaatctaggacataatgacaagtgtttgaattttatatgtctgtcacttatattttaataaaatatatgcaaagaatggttttatagataagagattttacatacttaatgttgataaatagtataaaagtatggaaaatcaattatatagttcatgtctggtttaaaaattcaatttttgtagttttattgtagttatttaaaatagtatattataaaattgcttgactgaagtttaacttctaaaaaatttgtactaaactgagtttttctgttcagtttcataagtgcttcttaaaatagacatgcattttgtggtagtctgttgaatgctgtttggttttttactttcattataaaataggaaagaaaaaagtataatatcatatgacaaaatccatttagtttaacattagttctttaaaaatgtataattgctactatactttggcggaaactattaaatttgtaagataagacgtttatactctatacccaaaacaaagtgaagtagctgttcataatatggcgcagaatcaaattttggtgataaaatcagacatctctctcctgccttacacatactcccactgagaaaataatttctaaatttggttacattttcatatacttcagatgaccttaaatttatatttttctcctgaatatatttgattcctgcatatccctttttttgggcatctgtgtccaatcagatccatgattagtcatgttagctttggacaagagtggaggtaggatcttagcaagtttgaaatctttaagattgatgtttatctgagattattccagcatgtccacggacatagtagttttgtgataacaaggtaatggctgatgaagattagcatattaataatagattataattctgttaaccattctattgtcaaatacgtgatttttgcgattcacatagtttaagtaatttttcatgcccaattagagatgtcaaaattatgttaattgaatctggccatgttcttagctgttttctagagcttaataacaaacatatcaggaagagctcttgtgacaagcacccagcacagcatctgtcattatgtaatcattccaatgtttacagtgaactaagtacttgagatggcaacattcatactttagtccctctgtctagtaattcatacttgtatagtctgtctactatgtgtcacccatttaggtaggtgctgagaataaaatggtggggttaaaaacagatattccctgttattgaacttccagtgccaatggtaattacagtgtagataataattacacactgcaactggaaccaatactataaaatggcataagttcctataagggtaggaacaataaagttagtgtataaataaagcacagaacctacacatttatttattagattgaattgataacttgcttttgaacttttaaagttaattctattaatatctgctaagctaggcatcagaaagactaaattctaaccatagagaaatacattttttatgctgctattctattttcttagatttcttaagaatttacaacaaaaccctgtcaaagcagcattcttacgtgagaatttcacttacgggagagttcttacaggatttcaagaaggaaagccctgaagagggacactgatttcctcaactgaatttaaaattgttacatgcagacatttttaaaggtagtatgattttccttaatcaagtcaactttatatctttttatctttttaaagaagggaatgtgacatttatgtttttcatacacacacacacacacacacacacacacacacacacacacacacagagaagcatacatgttgattacgttttggaaaataaaatccaaagagcatttggatgtctgaatgtttatgcttcatctccgcagtgacttctaaatttagtttttttctggatatactcaaagtcaccaacctgagttcaagtattctgatttgaagatctcaacttagagatccaggcagtcccccttgtcagtgctaggagaaagatgtccttcccataccttccagaaagagtgtcttgaagaaatatattccttcctgggtaacgtgctttggaatgtacatgatattcatttttctttgacagctctttttggttctgtttagttggctttgatgggttcatgatgcccagtggagaatttggtatttagccacaaaaagatatttaagacacataattatgtaaatattgcagatggaggatgatacatagcatttcttttatcaaaatgaatttgaattgacttctttctaaaacaaaattctaccaatagtcatcagtttttaattatataacttctcaatataggaaataatcagtgtctgattggctgtgtatgttggagtgtaatggcttttgttttgaatttggcagtttctactctcagaagaaatgagttgcgaattacagtggtgttagaagaaatgaattggaagttcgaatgagaaaaatttaaataaaagttattgtttatagatatggaaaggaaaataatgtttttagttcaatatgagaaagaaccttttaaatgtagaaataaaatggggtgcctttctacatccattcttaagaatttggcagaagttatgaagaagttaaaaagaaggagttcctgctgatataagtcacgaggattatttgaaggaaatttatgtcacatctcgtaaaatcatcatattgacaattataaatatgtaaaactttatgtgcaatagttattactaaaaatactgagctactatttatagtgagatcattattaaataaatttaacagatagaatagcaaatcacatttattcattcagtatattcttaccaacaacctgctgtatgtcagtcattgcataagactgatgtgatgccataggtcttgcagggaatgtagacattaagcaagtaattacaataaagtatagtggcttatgatattataaaaacaaagcagtccttaagtataccttgcaattgatctgtagtatattaattttaatccgctcatactcctcatgaaatgaggttgttcattttgatgtaaaaattagactgacgttctttgcagttagtagagactgaaaaagttcttattatttgtataacttatttaaaatgagaaactgctgtggaaagatctgcaggtttctgagataccaagaaacgtgaatatgagcagaataaacacatgcatattatatacattataaacgtcatttaagacaattatatgaagcagttttacatttaaaactaccaagttgtaatagttaagaagttgggctccagagtcatactggttgggtgtgagtattaactctgacacttaccagctttgcagtcttaggaaacctgcataactctactgtgcttcagtttccttacctgtaaaatggggataataagagtatatatcttgtggaaaaatatattatttgatatatgaaaatgctagaagagtatctagcatatggaaagtgcatagaaagggctccatatgttgttttagttaataattacaataataatttcctcatcttaaaaatatcctgcttcattcataaagttgtgccaacggaaataattgcagatgatgcttaaaatacatacaatatatatttcagagtggtatgtaaagagcttttattattactgctaaacaaaaaaaaagtccgtgaaattctcatctaagctttggggcctctttagctgaatttcagcagtcactcaaaggctttctagagatgccatctagagatactttataacctagtgtctttttttttttttttttgcaatacagaatttttttttcattgtaagatgctgaatgagagaaaattatttcagtactacaagtatggtttcccatgaccacaattagttctaatgtaaccagtcaacagttgtctattgaaaaccactagctattaatatagtatcatggtagcctaaaagaattatgctatccttctacttaggctctagggagacaagagccatgtaaagaatacttaaagcacaaaatgtgagactgctctgccactagttcctgctctgccactaataaacagaggtatcttagatatatgaacctgttacaattatgaggccatcttagcatctcagtacccttattatatatatcgtgtgtatacacacatggccatccaatatttctttcccaaattgaaatgagaggaattcattaaggtggttttaatttccaaatttactgagtaaaagaattctattctaaaaattattttgtataatgcccttcaaattgagttttacatgtactatttcaaggcttctcagatattcccacataaattatctagtgtttctgcatcactttgcgatcttttcattaatgtcaagtgtaatgttttttaacttcacaagggaaacatgaaattcctttagtgtgcctcattttcagacattttcttgttgattaaaattcctttttaaataaagtttcaacatgtactaaataatttgtttacctttgaattaactttttataaatgaattttaaataatgacagcagtcattacaaactctgctgttggcaacactagagggcatttctagttcttcagacagtgtcatgagttctcagaataatttaccaattcattaaacagcagattagcattttaagggaaaggaactaaaacaagcacaatacatatatcatacatatatatagtatgtatatattatgcatagacagataatataaatatccatatataatatatacattatataatatatggataatacatatatattggatgtatgtatactcacgtctgctttaccaaatgttctcactgaatcactactcctaaaaaggcgggagagtatttgtgatctgctcactgaagcaccactatattatccagttgtttattagtgtcgtggaggtctatgctctgataggtttagcatcaagtgaacattgagtaaaaaagtatatgtatatactcatacatacatactcatcagaagttagttgctgtgcttattgaactactagatgctaacatagtcataattagaataatttttcagataaaaaatgagagttaaaatagatgccctttataggcttagtagaagatttaagactacctatattttgaattactgtattttagatgttaaaatattttcaagggttttgaatgcaaacatttttagggaaaagatacaattatgtaatattaaatatataatattaaatattaacatgcaatgatatgaaagaagacaagtttataagaaaattcaattagcgtaaagaaaaacttttttttcttgggaggatttgcttactgcggtgtattggggaaaaaatcttatatatcattaagtaatcattaacacggtaaaagtaaagtcaaggaccagcaaaaaataacctaattgttgtgaaaataaggtgacaaacagacaatcccatcttacactgtaacatactttgtataagaggggatacatgataaccactagaacagtggtggatgtgcaggtggtagatacacaagggatataagaaagtctttctagttcaaatgtatttctgccatgtactttacccagtagaaatgcatttacatttttaagaggagcgtataaatctctcaaatatttctgttgatacatatacctatcattcacttaaatacctgagtacctactaagtataaaataccccgttattttatgtttggcacagtgaggctgtaacagtttatactcctattatgtagctgagaccagttggtctcttttagagaggggagtatcagttagttacagaaggactcatttgaatcatgagataatttgtgagaatgcagacccaagtaatatgctctaataaaatcagaaggcagcatgcttttgttgagaaatggaggtaggaaggtaacaacataaaataacctactttgtactggttcagtataccccataaactgtcatctcttttgtttgtttgttttgagggtacaaattatttcattttctgatattctctttcctaaggtattgttggactgaaacttaaccaattctcctctttttctgtctctgtctgtctgtctctctctctgtgtgtgtatatatatatacatatatatacacatatattctttctacacacacacagtaacagtatgtgcaagtcaaatttaattttaaaataaatcttttaaagcgtgggtcaatctgtgccagtcacacacagggcagtctgccgtatcttttgcatccttgttttgtactgctcgtgaatgttcgttatatagtagagtaggtaattccatatttacttgtactagaatatatctggcttaatagatgatgttccaaaggcttgaattaaaaaaaaaaaaccttagtgtaaaaaatttcaggcatacacttaagagagactagtgtaataaaccccatggcctagatttaacaatcagcaaaattttgccacatttgcttcatctactctcttctttttcctcaactatttttaaagtagatcccagacttcaagtcttttcactcctgcattctttcatatgcatttctttaaaagaaggaatttttcttatataaccacaatacctttattacatccaacaaaattaacaataactactaaccacctcatattctctctgtattcagtttctctgcttttaactgaaaaatgtcctttttacgtttagattgttctttcagaatccaaccaagatctgtatagcatttggttgtttggactgctgtataattaaaaggtcttttctttcccaccacttgtttacctcactcacccccaaacccccttcttcctccttccctccccttttccctttaatgtgttaatgaaaaaactgggtaaactatcctgtagaatatcctccattctggatttctctgttgccttctaacttgttcctgtagcctctgaatttcctgcgaactaaaagttggcttgaaagacttaattagtttcaggttcagctttggttttggtgttgaggatggaaggcatgcaggaatactttgcacatggaactgtttcttcatactgcatcacatcaaggagcatataatgtctgcttgtcatactcttatcaatgctaaaattgggcagtggtgccaacccaatctctctattgagagttttctaccaatctttcctcccgtgggaaaagttgctgactgttctccaaatcaattctgtcattagggtttgcaagagaatgaatttttaaatctgccaccccttacacatttattagtggaaattcttctgtaagaagaagtttccttcataaattacacctttttgatttatctgaaacaatgtatactggaaagaagcctggtgtcttaaatatcatctgttaatacctagtgtaacattccaaaggtaacttgagatactgcaaggaccacatagcaccttgagtacctattttacatgtgactctgaggactttcacagaataaagatatttcttattttaatgaacgttgtcagtatcaggataattttatgtagtcaacatatatacagtgttggtcctataggagttggagaccttttgccagttttatttggtcaaatacattattttgtgatgaaataactgtgagtgatgagttgagcctcaaagaacatgatacttcattaaatcaacaagctgaacagtatcatctaaccaaagctgtagaataaatggtgataaacttaaattcaggaatgaaacaatcaccatttttgttacaaatttgtccacccgtcatcactaaccccatttttatttaatactggtaatgaacaaaacctgaagaagaaataaaactaaaatatttcatttgtagatgacatgattaattatctagaaaaatctacagcaatcagctctaaaatgatttattaaataataaaaatttaataaagtaccagatatactgtatctttataccatgtgaaaatcattctgggaaaatatcccattcagaattgcaacaaacgatgtaatatctagcaatacatttgagagagatgttagatctttggaaaataaattaacatccagtgtatttgaaacaattttaagattcaaataaaagcagagaaactgtttctaaatcaagaatattggcaaattatttgactaaaagtaagatttttgggtttaacctctaacttccaaaatttctagtgatttattttatagtgattctgtaatgagaagtctcgtcctactaaatatcaaaaggttttaaagcaagaatgtctaaaacagtgatgatgatgtaagaataggtgtgttacccagataccagaagagacttctctgtctgttggagatttaagtatacattttctggccaggcccagtggctcacgcttgtaatcccagcactttgggaggccaaggaggtcagatcacttgagatcaggagttcaagaccagcctggccaacatggtaaaaccccatctctactaaaaatagagaaattagctgggtgtggtggtgcacgcctgtagtctcagctactcgggaggctaaggcagaagagtcacttgaccccaggtggcaggggttgcagtgagatgagattgtgccactgcactccagactgggcgacagtgagactgtctcaaaaaaaaaaaaaaaaaaaaaaaaaaaacaaagtaaatttcccttgaagcccgacttcatggccggtgagagtcaagagacatggcctggatcccgtgacttacacaaatccctgtggctgactcagaccttagtttctctgcctctgcttgcatgccaccttggtttctgccagtgtcaatacatatgtgaaaccagcccctttactagtttcaaacatttaacattttgtgagttaagaaatcctgaataggtgatagaccagcaaatgattttcttaatttttgagtggaacatgctatctatgttcattcttttcttctactcatactttactgaattaatacagttgttttcttaagaggaatactgaacaaataagcttgttttcattttgtaaaacatagattactggagcactatgaggaatacaaaatttgtcccatctgttatcatatacagtaactaaatgtatgacaaaataatctttcctaagagaggggcacttaaaggatatttgttcagtggtgttggatagtactattcagtgatatgtcttaaaactaattagacaaaaatcatccgtatattacacaaccataggaataaaaaagaaaaggtaacagagagaatacctttacatctcatatttgaagaattagtagaactcacccagaagatacttgaatattaaaaatttttgttggaccaaaatattatgattaaaaggataatagaaaattgtggaaactacattaaaaattataaggaaagtgataataggtataagttatatattgttgtaaatatgcaagtttagatatcaagattataatacataagtgagaaatgaatatgacagattaagaatatgaaagtaaagacacatgaataataaagaaatatgaggtttttttcattgtattaaaggacataaatttttaaaaagagaaatctaatatttgcaagtaagcagtgctaacagacccttttgggaaataatgcagtaatacatgctgagagtcacaataatgtttagaaatttcataataacatattaggaaacactatgctaattattttacatatatatatatataaaatgcccagcttaaaaactaattatagaacagcaacataaaatattacatttaaatgattatttttggagactatagaacaacactgttcaggagagctttgtggtgatagaaatattctgtgattgcactatccaatatgtagccatttggcacatgtggctgctgagcccttaaaatgtggctagggcaactgagaaactgaatttttaatttaatgttaattatttaaatttaaatagataaatggggctagtggccacaattttagatagtgtagttccagaaataaagagaaatgtttggtataagtgaaaataaaatagtaaatttatatgccatgattacaagtatgtacataactaaatgtacgtatggaaagtgatagtcataattaaaatatttgtgttaggattgaaggaaataggtaatttttttaaaatgctaaatttttaaaaggttacatgacaataatgtaacacttcagcattgtactggtactgttcagtatggtagccaccagcctgatgtgcaatttaaacttacatctgtttaagtaaaattaaaaattcagtaccttaatcacactagccacattccaaatgagcagtagtcatatatggctaatgtttgccttttcgaacaatgaagctatagaacatttttgccattgccaaaagttctattgtacagtgttgtagaaagaactggtaaaaggaatatactggaatcagtcactgatagtttatttgtcagtagtttctaagggcacatgagaattaaaactggaaattggattcagtaaaaagtataaaggaagagtaacataagatcctactcctgtaacttagattagtgcttttttttttttttttttttttttttgagatagagtctcactctgtcgcccagactggagtgcagtagtgtgatttcagctcactgcagcctcaccacctcctgtattcaagtgattgtcctgcctcagctacccaagtagctggaattacaggcatgttccaccactcctgactaatttttgtacttttagtagagacggggtttctccatgtttcccaggctggtctggagttcctgagctcaaataattcacttgccttggcctcccgaagtgctaggattacaggcttgagccactgcgcatgacctacaccagtgctccttgaagaatgggctatgaactggtgctggtttgttaatcaatccatgactaaatgcttactctcaatttctatattggtttagaaactcttacagccatgtgatatttgtgtcattcaggcacatcacctgtctccccggttgaagttcaggccagtagttttaacgcagttgcctggagagttttatgcaaagtgagctgagtatagtcatgacggtagtccatgaacctgggtccccaaaagggagaaaacagtctttcactacagattgcgtgagaaacattggccagcattaaagaaggaaagtagattgctcagggaagttttgtagggaacttaaaatgagatgttagtatggcttagtaatctgtatttgcaggtgaaatgaaaaattcagccctaaatctctgaatatggtaaacttagacttcatcttctgcaggtggaaatgaggcaagggatccattatccacagcatgagtaagtttctagtcagttcctctgtctagggagtttgttttcccttttcgcccttgttggcctgggagactcaaccagcttagtagtcttttcctttcagtaagatttccaactttgggttggtctttacccctttttagctctttttgtcgtattatctgcacttagtactttgtaactgttttcaccccttccccccaaagttagttcaaaggcttacagcatgttgaaaataggaaaattgtttttaaattaagtgagtttttgtgtacacttatttctttagtctaaagttttgttttaaatctctttttcacatttaaacctgattccctgagacaagatataaaattgaattatttgtgaaatgtggaaaggtttttattgcctgtaatcaaagcataatctgtccattaaagcattattttagtgatgaagggtggacatacatcccaagtttactacctgttttcttactgtggttttgaccatacagcaaatggtattttatactctgaaatgaaatgcaccatacacattgtccagtatgttttgagttttaattctacattttcagattttggggtcaaatgaaatcaagtactttataaatagttgtttcttctgattctactggccttacatgttagatttttttaaagtatacacattcagtcctttatcagtaccattaatcaaatgttgatttcagcatttcttcattttgttttcttttttcttttctttttttctttttcttttctttttttttttgagacggagtctagctctgtcacccaggctggagtgcagtggcacagtctcagctcactgcaacctccacctcccaggttcaagcagttctcctgccttagcccccccaagtaactgggattacaggcgcttgccaccacatccaactaatttttgtatttttagtagagatggggtttcaccatgttggccaagctggtctcgaactcctgacctcgtaatccgccagcctcagcctctcaaagtgctggaattacaggcatgagccaccacacctggccagcgtttcttctttttctctctaatttatcaaatttggaaacagttggaaaacatttaaaggaaataagtctctgtgtttttaataatagtttaaaagttaaaggaaaacaaatgaataatattctgtttattatagtcagacaaaatgtacatacgaaaatacataaggaaatatagaatggcatcttctgattttaatttaatattatggtaatgatttacttaggcagaattatagctatagacaaccattttatcactttatttatatcgatctactctctatggatgaaaacagttaatactaaagcattaagaaggtatattgcttttcatctgtattaatattcttcttctgatatttgatatttaataatatattttaaaatactctgcatgatttcctgatcttaaagcattccattcctttcaaggaatttggattataatgatttatttatagtatttttgtcattaatattttaggatatggcatcttaaaatattgtattcctaacagttatttaatatataattaaacatctatattagtattattttatataacatattttcaaactcctcagaacatttgtaggtttttgtttaattttatgtaagtttcaccttaagaatattgactaatcggttaatattcttcttaatcatcgcaattttttaaaatgctttctatgtaccaggacctatttaaggtactacagataatcagtgtgtcaaaaaacaaaaccaaaattcctttcctcatggagttttacattctagtagattgattctactgttgattcatactaaattaatttattaattatagtagattattctgtggcatttaacagaattcaaagggctacttttctgttgttaggaaatagcatatgccattatcttggaaatacaaagggaggacagaatttccgctggctctaacccattgctttttaatgagtttagctatgtatatatattttaaaatggaatttataattatgatcatttggcaacctacagtttttctgtattttttcaacttctcaacttcccagtgatgggggtggatgttgaactagtcacttaaggttttgggtctaaggagtaatatttgaaacatgcagtatttagaggagatatttttgtgaatgaagagaatgtgattttaagaatactcatgattttatctaatttctgttctcaaaacttcattttgtaatatagaagataagcttgatcaaaatagtttgatcccagtataatcttttactcttctctcctcccttaggacaaccttaaacttccaccacaagaggaatataaagaggtccctcctgcaccaagaaagatctgcagatctttttcagtgttcttggaggtgtggggtgtgagaacttgatcagtttgtgtcagccaccttgttctctaaag

SEQ ID NO: 1633 - DNA, 10196 bp, Homo sapiens
  full length sequence of bloodCirc_03075
aaagtagcacgtctggaaattgagaacaaagtccttcaggagcaattgaaacaggctttacaggaagctgaaaaagctaagcatcaacttaactatttcctaaatcaagagaagttacttaaaagtgaggggaaaactgagacaacaatgcaagtgggtaatagtcaaacaaaagttaaaggtgaagattcaaaaaatataccattggagaaagaaacaagaaaatcactggtttcagattcaggtggacaaaggacaagtgataaaatccaagaatatccacagatcactgcccaaagcggaagactgattgaaaagagatgctaatagagtttctgaaatactttggaaaagtctcccaaaccttcagagagtggatgggagcgaagtaaggagaccccacctgagcagatacatggtattgcttacaataaagtacatttttgctctttacaacatttatcagtttattttggcttagggaatgagttagtggtaaatagttaatcaaacaatagattttaataatttattgtttcacatcatgtgcgttgttagcttttcttaaatgttttgtggcattgaaattcacactttttagaaatgaaaatgtgaactaattcatggtgttttattttgaagagttacacagtcaacctagttctttctaaatactttcattaggactttcattattacttgggtttgctatcaagcacgaaaacatacaagagaagagtgttggaacatgtccattttttttctccatagattagatgattagctgttaaatttactcattcatttattcacccaactcattcaagagatacttttgtcaccttcatatgtccagttctcttttgggtattgtgttttactgaaaaatcagacagataagatgccttttcttgtggtacttacattataacaggagagacaaaaaataaacaagtaaaaataaatgaacaagataattttagagactaatacatggagataatgaaactacatatctgacagtcacagggaaggataatttagattgggtggtcaaggaaggtattaacaatgaagaaaaggcattatctaattgtgaaataaaggctgttaaaatattttgtttcttttcaatttttatcaaaataaatttctgcaaatgaaaatgtatgttataactaaaagatctagactagaggagcttttaatatcctcagttaactgttacacaaggggcatattactagtgacccaaatagtacgcataaggtagattttatagaggaaaccttgcaatccaggaagcaatagaggatataatatcccctgagctgtcattattccgtagagaaatagacttagattaagcaaagctggattcaccatagaagatgctcctgagaggaacccccttctcacatatcacttcacaaaattataggggaattgggagggcatagagagcacctagtcaaccatgtatcactgagagcttcctggttggggcagtggccttgttggaaaaagggagaagggagtatgtactttgtataccaatgtagctggtatcagtgagtcaaacagtcctggtgagccagctctgtgaaaccacaaaaagagggaagaaagagaatcaccgggaccatccgtaaataaagatttgcctcactgctgtctatcctttgatcttagagactcattattatagatctctccatcagccctggctgacacctggttctgagcataccaatttccttagtattgtctgggagaagaatattagtaaggtcaccagctgggttagatgaggatgtagaaccaacatcctaataagttcacattatgaactctttttcctggccaagcacagaaacctttgtttaggaatgtctgttccatatctgccataggaaagagaaagtcgttcatcacctcccttgaacatccatctccaaccatttcccagggtcagatatgttcacatctgacaaacagatctgtttttctccatggagatgagccagattgtcctttgtctggaatgatagttcagtggggaccccaaagttaccattttgccatcataggtcacctgcaggtttcaaagaggatgtctgcagcaccatctgttgcttttaaatgagcaatatgttgtgtgttcccatgcactgaggtcaaagcaaagggggttaaaaaaaaaaaaaaaagaaaaggagtatactattcctcttgaaatgatatttttctctactccctaacttctaggtgctttggagtttaaccatggtaagaggggcccttgcttggtacggtagcctatagcttgtaaacaattagggaaaactggactgacaagccttgtggaggttgttttcaaaaaggctgccttaaatggcaagtagaataagcctgatggacaacagtggcctgtgtgtctttttttttttttttttttttgagatagggtatcactttgtcccctaggctggagtgcagtggcaccatcatggcttactgcttcttcaacctcccacactgaagccatcctcccaccttagctgtctgattggcggggaccacaggcatgcatcaccatgcccagccaattgttttattttttatagagactcagtctccctatgttgcccaggctggtctagaactcctggactcagggacttttcgcacctcagcttcctaaagacttctatgtcttttgaataaattccttattggccattgtgttccttcatagcgggatggatttgaacaggcacccaagactatactggagatgatggttacacattcttaattggctttttcatgtcacatgttttcctttagattcagttctttctcatggacatataaacatagaatataagaattgagcttgtgactaagttgttgtaactatttccttgggcaaatgttacctcagaaaagcatgtgtaaagagttctgttggccaagtgtggtggctcacgcctgtaatcccagcattttggggaggctgaggcaggcagatcacgaggtcaagagttcaagaccagcctggccaatatggtgaaaccccatctctactaaaaatacaaaaattagctgggcatggtcgtgcgcgcctgtagtcccagctacttaggaggctgaggcagaggaatcacttgaacctgggaggcggaggttgcagtgagctgagatcgtgccactgggtgacagagcgagactccatctcaaaaataaaataaaataaaataaagagttctgtcctagggaacccaatagcctgacagtgtaactaggctcattactaatggctcattagtctttataatagtgcaattcagtcaatctgaggagattgtgctctatggccatgaagaatgcctgaagtttacccagttttgaagcatgtccaataccatgggatctcaacaactcaccatcattatggtgaaggaatgtatcactccataagattttatgacctttgagagaggcttttccattagtgaatcatgctttcttgtcaggtggcaaatctttcaggcaagtgccttactgagtcaatggcttgtttaaaacagcagagggatctctgtgcctgtgagtgtagggccatattttatgaatttgtctaaggtctaattgattggatgtgctatatcccccttttaatagaattttcctgggcatgtaccaccttatcagattttggattagagaagacccataatgcgataggaatgtcgggttgaagagtgagaaaagtctgccccattagggctcagtaataggctagcagtcactggcatgtgccactcagcaggagaagaaaatcatttcatccaaagatgtaggaaatgacaaataacttgaagtatttttgccaaaagcttccgtcagaaaatggtttcttacaggtatgtgtaatcccatgagtttgaaagatacggcaaaatctaaagttagaacttgtttttaggatgcctagacctcttccaaggcatgttaatatatgggcttctattttaaattagttgcattgatatagtgctttgaagaatcaccaggtgtaaaatgtgatatcaccactacctaacaaggaaaatcgtttgtggttgggactggaggcccgataaattttcctttaaagcagcagtttcctgcctttttagcaccagggaccagtttcgtggaagactccacagaccaggatggagggggtggtttcaggatgattcaagcacattacctttattgtacactttattattattattatttcattataatatataatgaaataattatacaactcaccttaatgtagagtcagtgggagccctgagcttgttttcctgcaactagatggtcccatctgggggtgatgggagacagtgacagatcatcagacattaggttctcgtaaggagcacgcaaactagatccctcacatgtgaagttaacaataggatttgtgcttctatgagaaactaatgcggctgctgatctgacaggaggtggagctcaggtggtaatgcaagcgatgggagagtggctgtaaatacagaggaagctttgcttgctcactcgccactcacctcctgttgtgttgcccagttcctaacaggccatggactggtatcagtttgtggtccaggggttggggatgcctgctttaagtgatatagaatgtatctttttgatgctgtccagatgatgactgccttctccaaatttatctgaataacagggccctggatcatttaaagttatctttaatcaggtatgcctagacaacatgtaatgtttcttcggtgttgatcacagtcatcagtgtgatataatatctggagattctagcaatgcacattttactgggttttgtcccacattgaaaatgtgtaacaggaattaaaacattctcaagaaggattattaaaggtatatgtactaatcttggcatatcttgccaaatcctcagctacatatgtgtgtcagtagtggcagcaatttattctatagcttgtgtaaggacagagactggagtaagtagagctgtttctttccttgtttaagtttcagtagtccactatggagtgtcaagtactagtttttgttttttttttcttaaccaaacagactagcattgcatagtgcattgattacattttgtttgaaaaatactttatttttatgtttcttgtatgaaatattatggaatgatcttgccagttcagacaggttttcaccatgtgcttggccagccattatggaggttatcaatagataattatccaactaatatggctgtgtacctgttctcggtttaataattcagaatgtccttatatcaattatataatctgagaaagaaacagcaaacagtattaatatagagtacaaaaatagtagccttgtgtgtttgggttccccaagactactgccctcactaggagagctcacagcactcatcaaatagtcattacgatgaccatgatttattacataaaaaggatgcaaagcaaaatgagcaaagggaaaatgtgcatggtaaaaatccaaaagaaacatcctacttaatctgagattatggtgtcccgtaattccttagctacctgatcactatagccattctcactgagaacaagcaatttgttctttcttgagtttttaagactatatacgatatggacactgagatattggccatttcaacttagtagtttgtctggtataaggcttccaatggggttatttcccacttcagcggtagcccaaactctctgtttttcaaaagctgtaacatacacgagtcacataccactagctacacataacaaggtttattgagaaaaacttacaagcagaatagcgagcagagcacattgcaatattgcagttatcaatgaaggaccttgagagtctctgccaagctaccaagtagggaagggagatattaaccgaggccattcagaaacatgtttgtcattctcattaactgatgactttttttttctagtaagagaatagtttttcttttatcctatataatttccccatagtttgagttccatttctgattatttcagtaatagcattgctggtggagctagatgtagctaggcaacattgtcagcataagaattatttatacatttacaaactatttctaagcagtccatcaccctaattttctttaagttaataatttcaagtgttttaaccttttatcttttccaggctcttagtcatcttggacttttactgaacctttaaaactttttgactttcttttcagttgaggagcctaaaactagtcactatgaatattttgatcaacattaattgtattgtattgtaaaaactatcaaaatatttataacttttgacttttataacacctatattgaaatttttctataaaattgatttttagaatcatgttagtttgtactgtattacaaacttcgggtcctagatatttttgtttttcttgtatataggaatgagttccacatgttgtattgttgcagataagaatatcaataatattttattagtattttattgataatttgtctcgtatttgcattgataattaaaaattcagtgtaacataaatacctgtgagagtttttttccctaaggggagaggatatggattgggggttgtgttgacattttagaaaatggatggagttaaggaaagttccggaaaaagaaagtattggaaagaaaaaaaaaataaagagggcagtttgaaaaagaaggtattagaaagaaaaaaaaataaagagggcagtttgggcagttaacattcaatgacattttccattttgtctgatttaagaattatgaagtgtccatgattatatgcataataaatagtgcccttgtacatctatttgcttagtaagaaaaggatgcaatgctcagatcttcagagttaacaaatgcttttgcaagcaggaagagatacactctttataccacttcagtgatgttgaagactgtcatgtagagtgctgtcaatatgcttatataaaagctgctaaaatacatgctcataattagactattatacggtagtatttagacatggagtgattattagagagtcttaatctaaagcagacagtgaatgacacaaatttagtaagatttataaactatattttggttgtttttggcaattcaccaaataattgggagggtgaaaacaacttgctttattattattttctttgtggctataggctgccttctatagtcatcattgctgttctcctcctcctcctccttcaactcctcctcttccttctcctcattctcctctttctcttcctcctcctccttcaccatctaatcagtagggctttgaaagtatttccacatctctttgactggcacaagcttgaatacagcattgcttgcacaccttcctagtagtttttattcctgaccccctcagtggaagtatcatggttgttatgctgtggttccttatggatgcaagagacaacagaagtggggaaagcctgaacgtgggaatatggttataaatgtacagtatattagcatttaaggcattgttctttgtattgccacatattttctcattgttataagaaaattgcctgtgtagaatcaagtgattaatgatgtcccctaataaccatttcagaatcttaaaaaacatttgctttctatttttagctatgtgataatattagtgttggggtggtggtttgtgaataactgtaacaaatagtgtccagatgagtgttagactttattttagaactaatcatcttaaattcaaacacctaatagaactaataaatcaggtttgagaatgagatgctatccttaatttaggataggaagccagctattctctttacttttaatatggcaatttgctttataatgccactacaaaagtctgtttgtcataaattctatgtttttttaaactgtcagcactatatatatatatatatatatatatatatatatactttttttttcagagctgtcctctccaccccactccccttttttataacccaaactttgcagttcaaaattcattctaaactaacaaacgtaggataggtggcagtaggtacattgaaaaatttttcttctgtgagaccaaacttcaaattattttaaacactttgcaacaaaccttaggcaaattatgtcaactggggtaatagctgttcaaaacaaaatgcatcaaattctgttgcatttcataggactaggaaagctttgttaaatttttatatagtttgatcacttaaattatcatctaaactagaatgttgggacaacaagcagaaactgggattgtgcatgcaaactgtgacacctggttaccctagttctggaatccagaaagctgatcctttggcaactggtagagaataaataccccttatcttaaagaaaactaactcagagcttgggaaattgactttggtgaaagatggtgatcttttaatgtcaaagtgactgtggagatattttaattttcattctgaaataaaattgtggaaaaataattttggaataaatgtgactaaagggtaaatctccaaaccatcctatgttctactttggctgagtaaatttttcttgttctatggcttacaaccttgaataatgattatattggagtattttaaatgatttccttagtattatgtatccctttaaatcacaggacatatgttactatcttcaacttgttacctagcatcaatttcatattggaataaccataaactaatgagtaattatacttacttatttaatatccttatatattattaaaatgattcttcagttgcaaataaaatggtcttcacataatctaataccagatgttttataattctaaagctcagagaagaaacgatctagccctgctatttcagatctttcacagatccttaagtctcaagatgaatcagcatttttagagagttcaaatgaagtttcagttgctgaaaaccaatcctataaatctccatcagagacccatgataaatcacttacaacagtatcatccagcaaagaagttcaagattcactgtctgttggaacattggctcaaaaaaacgaaacagtgatatcaccattcattttacctcctgttcttacagaaagtaaaaaggtatgatatatatagaaacttgaaagctgtttatttcatattgctccttcaataaataaatgctaacccatttaaatgggttaaaaattcaatattttcttatttcaagagaattaaaagtttgccttttaacacaacccactttatatttagaatgctgaaagtaatatttgggaatctaagtaatattcttaacttataaaaattgtttaatattgattaaaaagttgtgggttacattttagttttaatggtaatataaaagatatgtcattctgagataagggaaattttcatagttttcagcttcatctacaaaaaaaatttttatacaataagatgattgtaaaagcaaactaattttgaaacaattttatataggtctctaaacaagacctagaaaatttttagaattgcttttgttaaaaagcatttaattaggaaattctcagggcaaaaatgctgggaaaaagggaaaagataaaagggctgtacatatttgacatgtatccacaatatatttttatcatacattttattaaagtattcctataataataattttgtaagccatttgagttcttctaaagattaaaacagactaaaatataaatctaaacaagaatcttaataattattaacactatttgcttagaactatttgcgagggaaaaatcacaatattgcctgggcaccctccttgctattcagtgttcccaattgcctctcaggtccattaattgttctgactttttaatttgatacattcaggaaataatgaaaaataaaatgtttctgcaatgacattgtagatgagagcaaaaagctagctctttttctcaaagcaggtaattaaataccagtcttgatatatatatatatgtatataatttctaattacttattacaacttttgttattaaggctgatgtttcagaagaacaattacaaaagatgactgaagaacaaacttaccaagcagcagaaaaatctcaag

SEQ ID NO: 1634 - DNA, 667 bp, Homo sapiens
  full length sequence of bloodCirc_19518
gttgaaaggattgttgacaaaaggaaaaataaaaaagggaagacagagtatttggttcggtggaaaggctatgacagcgaggacgacacttgggagccggaacagcacctcgtgaactgtgaggaatacatccacgacttcaacagacgccacacggagaagcagaaggagagcacattgaccagaacaaacaggacctctcccaacaatgctaggaaacaaatctccagatccaccaacagcaacttttctaagacctctcctaaggcactcgtgattgggaaagaccacgaatccaaaaacagccagctgtttgctgccagccagaagttcaggaagaacacagctccatctctctccagccggaagaacatggacctagcgaagtcaggtatcaagatcctcgtgcctaaaagccccgttaagagcaggaccgcagtggacggctttcagagcgagagccctgagaaactggaccccgtcgagcagggtcaggaggacacagtggcacccgaagtggcagcggaaaagccggtcggagctttattgggccccggtgccgagagggccaggatggggagcaggcccaggatacacccactagtgcctcaggtgcccggccctgtgactgcagccatggccacaggcttagctgttaacgggaaag

SEQ ID NO: 1635 - DNA, 893 bp, Homo sapiens
  full length sequence of bloodCirc_03513
atctaaatgttaaagagaaaataattgaagacatgcgaatgacactagaagaacaggaacaaactcaggtagaacaggatcaagtgcttgaggctaaattagaggaagttgaaaggctggccacagaattggaaaaatggaaggaaaaatgcaatgatttggaaaccaaaaacaatcaaaggtcaaataaagaacatgagaacaacacagatgtgcttggaaagctcactaatcttcaagatgagttacaggagtctgaacagaaatataatgctgatagaaagaaatggttagaagaaaaaatgatgcttatcactcaagcgaaagaagcagagaatatacgaaataaagagatgaaaaaatatgctgaggacagggagcgtttttttaagcaacagaatgaaatggaaatactgacagcccagctgacagagaaagatagtgaccttcaaaagtggcgagaagaacgagatcaactggttgcagctttagaaatacagctaaaagcactgatatccagtaatgtacagaaagataatgaaattgaacaactaaaaaggatcatatcagagacttctaaaatagaaacacaaatcatggatatcaagcccaaacgtattagttcagcagatcctgacaaacttcaaactgaacctctatcgacaagttttgaaatttccagaaataaaatagaggatggatctgtagtccttgactcttgtgaagtgtcaacagaaaatgatcaaagcactcgatttccaaaacctgagttagagattcaatttacacctttacagccaaacaaaatggcagtgaaacaccctggttgtaccacaccagtgacagttaagattcccaaggctcggaagaggaagagtaatgaaatggaggag

SEQ ID NO: 1636 - DNA, 228 bp, Homo sapiens
  full length sequence of bloodCirc_17257
gtgggtttggaggatttgggacaacatctacaactgcaggttctgcattcagcttttctgccccaactaacacaggcactactggactctttggtggtactcagaacaaaggttttggatttggtactggttttggcacaacaacgggaactagtactggtttaggtactggtttgggaactggactgggatttggaggatttaatacacagcagcagcagcaaacta

SEQ ID NO: 1637 - DNA, 146 bp, Homo sapiens
  full length sequence of bloodCirc_03656
ggtttgaaagtattcttgaagggctgtttggacctgcattattaaaagatctcagtttatttaaagactgtgaacctgaaagcatttctgattggacttttgatgaaaactgtttattctgttgcttgagaagagataaagtaaag

SEQ ID NO: 1638 - DNA, 157 bp, Homo sapiens
  full length sequence of bloodCirc_15717
agtgatgacagacctaatgctctattaagttcacctgcaacagaaacagttcatcattcccctgcatattcttttcctgctgctatccagagaaatcagcctcagcgccctgaaagcttccttttccgagcaggtgtcagggcagaaaccaacaaag

SEQ ID NO: 1639 - DNA, 1744 bp, Homo sapiens
  full length sequence of bloodCirc_05517
gtgctatacgtggatgacctgcttagttttaatttttggagaaatacattttataaaacattttcatcagattgctaaaattgtgagtaatggtaatgataccatgattatattctggttaatttaatacctttcctttttacaatatgtttctgtctaaatatatattttttagtgtcattacctactgagtttctgtgaaaagaatttcctttgcctgttaaaacaatcgttgaaattaatgtttttactgtttttttctttgacaattttttgaattttctttttgaaggtgttagcactagtttccagaaggtaaagcacagatatagatgactacttaaagcaaatgaccttagaaaatgcccttaagattaatgtttaacatatagtttaatatgtatagctatttttattttagaagtgggaaaggattgttttcctgtaatgaagtccatcttgtattactgagtcaaggaaactataatcaacatttgggtatgttcacttaaagttttctttttaatttaaaacattgctttttaaattaacttttaggttaaggggtacatgtgcaggtttattacaaagacaaactcctgtcatgggggtttgttgtacagattattttgtcatatggtcacttctgaatgatagaaaaataaaccaattattactgactagagtattacttgcagctatagattcacaattacaggttccaaattgtaaattaagaaacaatctatatgagaacttatttttcattttaatgtatacttcctcttactaatttcaccttttcaggttatttagttcttgcatggtttgtttgataaagctgctgctcctttttttttttttaaagccctgatactaatggttttatcttttcatttttatgatatacatttaggactaaaaaagcaaataatatttgagtgcttgtctctcttacatactttaagagtaaagaaaagaggaattctggatatttatttgtgtttttctcatccctcatctcccatgaatacatgacttgatttatcttgatcagcctagtaacttgctccacatttttccaaaagtgcaaagcagtttcagctaaaaatacacatatcaaaatgatccaaaagttgtggccacagctcaaaaatgctgatcaattttgaaaatctaaatcagccttggccctgaaaccgagggaagaacctttgtggtaggggacagatttccaaaaactcaccacagtcctgttcttagctggagtttgtgctgatgttgccagacaactgaggaatagatgcaaaaagcaggaagcattattgaattgagctctagtgccaatttgggaaaagcaaattaaaatgtaaaagaatatttttccactcctggcatctcaacataaaatggcaaaatacatggttgctgaaaaagttacagaaattgctaattttgccaaaaagtaaaagccaattgcaaattcttttttgcataaaaaatgcatagacagttagaaattctaatttacaaataaatatgtatacatttaagttggagagtattttgacataaatgactgtgtgtgtgcgggcttgtttcaatatcttatatttttcaggtgccacttgaagaatggatgatgatgattttggtggttttgaggctgcggagacttttgatggtggaagtggtgaaacccaaacaacatctcctgctattccttgggctgcctttcctgcag

SEQ ID NO: 1640 - DNA, 194 bp, Homo sapiens
  full length sequence of bloodCirc_20627
gtatttcagttactaactgatctgaaagagcagcgtaaagaaagtggaaagaataaacacagctctgggcaacagaacttgaacactatcacctatgaaacgttaaaatacatatcaaaaacaccatgcaggcaccagagtcctgaaattgtcagagaatttctcacagcattgaaaagccacaagttgaccaa

SEQ ID NO: 1641 - DNA, 334 bp, Homo sapiens
  full length sequence of bloodCirc_15459
gaatcatgggtaaagaaggaagacaggctgcaagaaacagtgactatgcaatagccagatttaagttcctctccaaattgctttttgttcatggtcatttttattatattagaatagctacccttgtacagtattttttttataagaatgtgtgctttatcacaccccagtttttatatcagttctactgtttgttttctcagcaaacattgtatgacagcgtgtacctgactttatacaatatttgttttacttccctacctattctgatatatagtcttttggaacagcatgtagaccctcatgtgttacaaaataagcccaccctttatcg

SEQ ID NO: 1642 - DNA, 784 bp, Homo sapiens
  full length sequence of bloodCirc_07824
gtaacagagattcaaaggtaccttcagaaggaaagaaatctctctacacagatgagtcatccaaacctggaaaaaataaaagaactgcaatcactactccaaactttaagaagcttcatgaagctcattttaaggaaatggagtccattgatcaatatattgagagaaaaaagaaacattttgaagaacacaattccatgaatgaactgaagcagcagcccatcaataagggaggggtcaggactccagtacctccaagaggaagactctctgtggcttctactcccatcagccaacgacgctcgcaaggccggtcttgtggccctgcaagtcagagtaccttgggtctgaaggggtcactcaagcgctctgctatctctgcagctaaaacgggtgtcaggttttcagctgctactaaagataatgagcataagcgttcactgaccaagactccagccagaaagtctgcacatgtgaccgtgtctgggggcaccccaaaaggcgaggctgtgcttgggacacacaaattaaagaccatcacggggaattctgctgctgttattaccccattcaagttgacaactgaggcaacgcagactccagtctccaataagaaaccagtgtttgatcttaaagcaagtttgtctcgtcccctcaactatgaaccacacaaaggaaagctaaaaccatgggggcaatctaaagaaaataattatctaaatcaacatgtcaacagaattaacttctacaagaaaacttacaaacaaccccatctccagacaaa

SEQ ID NO: 1643 - DNA, 3193 bp, Homo sapiens
  full length sequence of bloodCirc_19559
gaaggaccatcgagacctgttcttgaatacatcgatctggtctgtggtgatgatgaaaaccctagcgcctattatagtgatattctgtttcctaaaatgccaaaacgacagggtgattttttgcattttttaaatgtgaagaaggtgaaaacagacacagaaaataatgaagtgagcaaaaatcactgcagattgtctaaggcaaaggaaccacatttcgagtatattgaacaaccaatcattgaagaaaagccatcactttcatcaaagaaagaaatagataatcttgtgcttccagattgttggaatgaaaaacaagcatttatgtttacagaacaatacaaatggcttgaaataaaagaaggtaaattaggatgtaaggattgttcagcagttcggcatttgggatcgaaagcagaaaagcatgtccatgtgtccaaggaatggattgcatatttagtaacccctaatggcagtaataaaactactaggcaagcttctctacgaaaaaaaattagggaacatgatgtttctaaagcccatggtaaaattcaggatttgttaaaggaatcaactaatgattcaatttgtaatttagtgcataaacaaaataataaaaatattgatgctactgtaaaagttttcaatactgtttacagtttagtaaaacataacagacctttatctgatattgagggggcaagagaattacaggaaaaaaatggagaggtaaattgtttaaatacacgttacagtgcaacaagaatagcagaacatattgcaaaagaaatgaagatgaagatatttaagaatattatagaagagaatgccaaaatctgtatcataattgatgaggcatctacagtttcaaagaaaaccaccctagtgatttatctccagtgcacaattcagtcagctcctgcacctgttatgttatttgtggctttaaaagaattggtgtcaactatagcagagtgtattgtcaatacattattgactactttaaatgattgtggttttacaaatgaatatttgaaagcaaatttaattgcattttgttctgatggtgctaatacaatcctgggaagaaagtctggagtagctacaaaattgttagaaaattttcctgaaatcatcatttggaactgtttaaatcatcgattacaattgtcacttgatgattctatatccgaaataaaacaaattaatcatttaaaaatatttattgataaaatttattctatttatcatcaacctaataaaaatcaaaccaagcttctaggaactgtagctaaagaacttgaaactgaaattattaaaattggtcgagtaatgggaccaagatgggcggcatgtagtttacaagctgctactgctgtatggcatgcatatcctatattatatatgcatttttctcattcttactctggtttggcgaagagattagctaacattaatttcttacaagaccttgctttaatgattgacattcttgaagaattttcagtactttcaactgcattacagtcaagatcaactaatattaagaaagcacaaaaattgatcaaacgtaccataagagctttggaaaatttaaaaattggtactggaaagtatgaatctcaaattgaagatttgatcaagtcagataagtttaaagatattccatttaataaaaacaataaatttaatgctcttcctaggagtatattactagacaatataattcagcacatgaacctacgccttttatctgacagaaaccatgaagatatttttaattactttgatttgctggaaccttccacatggccttatgaagaaataacttcaccatggatagctggtgaaaaaacattatttcatttgtgtaaaattttaaaatatgaagttgatttgaatgattttcgggaatttgtaaataataatataaaatcaaacaatgtttcaattcctacaactatatacaaagctaaaaagatagttagcaccattgcaatcaatagtgctgaagctgaaaggggtttcaatttaatgaacataatttgtacaagggtgagaaatagtttaacaatagatcatgtatcagatttaatgacaataaatttactggggaaagaattagcagattgggatgcaacaccgtttgtaaaatcttggtcaaattgcaaccacaggttggctacagatacaagagttcggcaaaagtcaacaaaagtcttccatgagaatcaattggctatatggaacttaaaatagaatattgtatacgttttttgtcatctgtaaattatgtactacacatcctttatatacataaaggtcttttttttttttggaaagccagttaaacttttatcagcatgttgctgtttaaaaggcgttctttaagaagataatcttgaagattggttttagaagctatagttttttagagattggcccatgtttgctagagtgggtcataatacatattccatgaagttctgtacagaacaaacaccgtttataattttgtactgttttactttaagtaaggatgcaaaaaatagcaggactcagctaagttctaagccctggaggttatattaaataaaagagaaatggaataaaaactgtaagccttttggctcttgtctttctcatttccatatctgtgctatctagtatggtagccactagctacatgtggctgatcagcttagggctaaaagtaaaatttttatttatttacttttacttaaatatgaaaactgaaacaatgtgaaatatttttctgcttagctttactgtttttcagtaatacattttactctgttaccttgcataagatatggttgttgtagtgtgcctgtcaaacttgtgtgtcatttccaatattgaatataaacatattgctgatagatatgatactgctgtcagcagatggattcaatgcaagttattttttctacaaattgatgtaacatcatgtttatctgaatattttatgcagacaacaggaattacagtgattcctgtgtaaattataactggtaattgaaatacttattttaatcatgattaaattatttttctagtttacacatgaatatgagcaaatttttaaatttaaaatgaaggcatactgaaaaagaatcaagtggcgatgcagaacctagtacaactggaacagtaaacagactcaaagaag

SEQ ID NO: 1644 - DNA, 1634 bp, Homo sapiens
  full length sequence of bloodCirc_17227
gggtggcactgaatcaacaagacaagcaactcaattgattaatgctttgatcaaggatccagacaaagaaattgatgaacttattccaaagaatcgtttgaaaagctcctcagcaaattccaaaatagggtcatcagcacctaccaccactgctgctaacacttccttaatgggaattaaaatgacaactgtagctctgtcatcaacatctcaaactgccacagcactcactgtgcctgcaatttcttctgcatccactcacaaaaccattaagaacccagtgaataatgtgaggcctggttttccagtttctcttccattagcatatcctcctccacagtttgcacatgctttgcttgctgctcagactttccagcagatccgtccaccaaggttgcccatgacccactttggaggtacttttccaccagctcaatccacttggggtccgtttcctgtcaggcctttgagccctgccagagctactaactcgcctaagcctcacatggtgcctcgccatagcaatcagaatagcagtggttctcaggtgaattcagcaggttctttaacttcaagcccaacaactacaaccagttcatcagcttcaacggtgcctggtacatctacaaatggcagtccaagttcaccttctgtccgaaggcagctttttgtcacagttgtgaagacatccaatgccaccacaacaacagtcacaaccacggcaagcaacaacaacactgcacccacaaatgccacatatcctatgcctactgccaaagaacactatccagtatcatccccatcttccccatcaccaccagcccagccaggaggggtttctagaaacagccctttggattgtggatcagcatctccaaataaagtggcatcttcctccgaacaggaagcaggtagtccaccagtagtagaaacaacaaacactagacctccaaacagcagcagttcttctgggagttcatcagctcattctaatcagcaacaacctccgggatctgtttctcaggaaccaagaccacctcttcagcagtctcaggttcctcccccggaagttagaatgactgttcctcctttagcaacaagttctgctccagtggcggtgccttctactgccccagtgacttaccctatgcctcagacaccaatgggatgcccccagcctactcctaaaatggaaacccctgctattagaccaccccctcatggcacaactgcccctcacaagaattcagcttcagtgcaaaattcatctgttgcagtcctcagtgtcaatcacattaaaagacctcacagtgttccctcttctgtccagctaccttcgaccttaagtacacaaagtgcttgtcagaattcagtacatccagcaaataagcctattgctcccaatttcagtgcccccttaccatttgggccctttagcacattgtttgaaaacagccctacttctgctcatgccttctggggaggatctgttgtttcatctcagtcaacaccagaatctatgctatcaggaaaatcctcatatttgccaaattcagatcctttacatcagtctgatacttccaaagctccaggttttagaccaccattacagagacctgctccaagtccctcag

SEQ ID NO: 1645 - DNA, 23640 bp, Homo sapiens
  full length sequence of bloodCirc_08494
tgtgaagttttaacttggagacccagaattcaaacttgaaactgtagaagagaggatgaagagaatattagcagttgaaaggaaaatgtagaaatagaaacattatgtatatttaacagaaaacaatgatcaacatgaaatgttgaagatatatgttctaagtgatagctatatgtagatatggttcagagaaggcaaattgcatgtattgtttgatacacggagagaagattcaggtaagcattctggagttaatatttcctgagttagttgacatagtattaaattatatttttctgtaaacgagatgccaatatgagtcgtcttttatttggagtgtttaagcaggggaaaaggaggcagacactgaatagcaactgcaactatctgagcaagtgttgtaatacactaaaagttctgatacagatttcattagctgcacgttagcatgtcatatctatcactctgaggctttaccttttacctatgaagcccacattggtaattaaacattttcatgtttaaacttctacaagaggctcaagttttgtaccttcagtttacgcgtgatccagttgcatatacttttcaagttgtttttatttttttgagacaggatcttgctctgttgcccaggctggagtgtagtgatgctatcatgacttactgcagcttttacctcttgggctcaagcgatcctcctgcctcaagccccacaagtagctgggaccacaggtgcacaccaccacgcccagctaatttcagctatatatacttagaacatgctaagtatacccacttgctaacattcacttcaacagggtaaaactggccctacctcccctccttactaaccaactctcctctgacttctgggtttgtcaagaaggctgccatccacatagttggccagataccaaaatgctgaagtcactttttattcattgagtgcttcatctttatatctaaccaagtctggtagttcttcctttggaatatatagcttgttcctttcccatcactgtcactattttatttatttttaatttttaattgttttgctatagagggaaagataattattgcttgtttttttgggaattctcatagcttcctcaagtaactttataacacattttcctgggtaatgctttttcatttttgcttaatttagttatgtaaccttagtttggctgcttaggtatgtcactggagagctacttccctattggagatgtaattctcagttctgctaagagaggagatcgtacacattagttagggttgtcataaaaggagttgaaagcatcagctgtgagcaaatcactttccttatgtgattgttttgaatttgaacaacaaatccatctgttttgccttaaacaaaaggtaagatgtgcataaagacaaatatttgtaacctagtatgagggaattcttaccctacaaaattattttaggagcaggctaattatatttacacctaggcagtgaacagccagtctttgaagagagtaaagtatcaggtaacttaccattttaaaagtctattgatggatttgtttccaggaagagagaatttaataacttattaatttaagggagcaagtgtttttgtagaaaagattatcaagattgtaatcaggccttaatgggagttttcttgtgagagattctagaaggagggagataatttctgttggagacttattctatgttgagaacacagaaatagttcagaagtgtattaggaatgtttacaaacttatacgtctgcactttattgagttaacaagtttactatgtcttgtttaaatagattttttttttactatggatacacaataattgtattagagaaattctttaaagatctttggtgagaggatccctctccatctgctgatttccagtatatttctgttgtgtagtagccagctatgcatgactgtcaattgaggtattaacgaggcatgagtttgcagttcagtaggaatctagacatagtggtgtcgtgggaagatcttcttgcacatggtctgatgtgatggataaccaactgtgggacatggggaaagcaacacttctctcttggcttcatttctcactctgtaaaataagggagttaaatcaaggcccttctatctctgagtctctcattttatgatgccaccagaatcccttctgagctcctcatgaagaggtgtttgttccatagccctttctatttttttaatgcagtccttgttctgatgggtatgaacaaagccagcctaaatggattggggttttggaaaattttttccctctgattgtaattaagtgacctaaacagatattgaatttatgaccataatgttaatagctttgtgctaccaacagcattttaacaacaaagcaggattgtttccaaactagaaatctatgaaaattcaaatattgatgaagaaggcttcacatactttgttgtacatagagccattcttaggaatacttgggatgctcattctaataataacttcagtataagaggtaattaagaacaaagacattggaggcgtacttcgtgggtccacatctggttctgcaacttgcttgttttgtgactttggacaagttataatacctactaaatagattttctgaggaataaatgctgaggaatatattcctggcctttagttctatatatgtttagctgctgttattaattatttttacattccaggagtcagtgcctcctataatagctccattaatcctcatagcagttctatgaaaatagtaccatttttatcttcatgaagagacgaagactcagagaggctaaataattggcccaaggtcacatataaaatgggtgctagattcaaaccaggtttatctgactcattctaaaactaaggctccttccttcttcatatattctgccctaagcatggtcctttggaaattcccaatgcttttaactagtcaggaggcagttggtgttagaagaccaaaggctcaggtggcatctaaataagtgcctctcttaatcaccatgataaaatgatgtgactcttctttagaaatgtgcctttcagacttcagggttttccatgaattattttcatacagtgtgacttccttttgttcatcttctctgcagattgaggcagccttggcacccagtccccagatagccttccttataggggtctcgaagtatctgggctgggttagaaaaaagactcctttgccatatctatgtccttacctttacagagtgaaaattgtaatacacaaaataattacaatgaagttaacaaccagagcatccccatagctccctttattcctcagatatttgtttaatatttagctatctgacattttaatctgaagtttggtccttttattttttgctggaaaattttagaatggctttagagtgaaacagcatcattgaaaataaaacaattgtcttctatttgcaaaactttaaagaacatttgttttaaccacctctaaacatttttgttttgttttttatttttacttgaaaattctatagcagaaataatgacagacaaataggcttctgtcattactcaacttccttatgatggtgttatacttattgctgagtaatagtaattagtgtggttttgggtgtaggcattttacattttgaatctgagaagattttaggttcacctgagttgctgaatcaactcagtatttcaggaaagtatcttatacatgggttccaagtagtataaatattaaaaagttaattgcatatgctctgagaaattctgtaagcactctttcacctttatttcatagatgaacagtgaagacagtggtgaggggattttatcaagtttatttgtaaaaaggcctgggctggcagactttttccttagagccagatgatctgtcacaactactcaactgttgacatacagcaaaagcagccataagcaacttgtaaccaaatgggtgtgactattaaaataaaactttatttaggcaggcttagtctgagaatcctaaatggatctggtggagggccaagggaaggcagttggcacacatgttgatgaaaacagttgtttaaacttctggcaaatttgaatactaacttaaaaaggtgtcaataaggtttatataaaaatgaaagcagtggtttgaaataccacaacagtaaggaccactctcacaaggagttctgtttccaaaatggcataattttgctcttaatgtatgcttaatagagtaatgcataatgtattattaatttggaaactattacttgtccagctacatgtgcagattttcagttttctttgtacatttaaaaatgataaatggaaagtgcaataccattcaggggaggaactactcaatacttaagtagttatttgccaaatcacattttgggttgtttctgtttttaactgacatactgactgaagtttgccaaaacctgattgcatttggaaggaaaatggcattgttgctattttctctgcatgagaatatctaaaacaggtggctggcagcagggaaggagtaaaggtaaaggacaaaaatataatagtttgtgagcttgttttttttttttgcactaaatttcagatctagctaggttatgttttgttttactctgatcttcagaatacctaatttattttctacattccataccctccctcaggtaaataagggaaaccccactgtattacaattagtattgaattcacttacatttttattattgaggtataattgtaaatcattttgttagagtttaatcttttgattcaagttgactggtgtttttatttgcaatctatattttacagtgtttaatcctaagtatgtttccatgaacgggtagtttgatttttagagctagagagagtaactgagttaaagtgcaccaggtagcttagaaaacattttaaaatagtgactttataattgctacatcttagagcttaagaaatagaaaagtttagattgaccaaagtcattctaaaaagcaaagcaagacccacatgagtattttatattagatcacatttctgtgcttttattagaaccattaatttggtagaattcctaaatctagtaagtaatattataaaaatgatgttgtatatgggggtgatgccagtttgaggctataactgagtatagccttgggtagcgtttttgctcaaagcttgctttttgtttttcacaccgatagcataaggatgtcatgcagtccccagtctgaatccctagtgggaagattttgaacagagttctgacaagtagggttatcacatttttatgtatcctttaacagttatcctacctaaaaagatcaaaaaggaacgtggagtcagatgttgcaagttttaactctgatgtttcttctcaaggcagatttcctattgcagtgtggatattcttctctatttaaaataatgatataaactggctgggcatggtagctcatgtctgtaatcccagcactttgggaggctgagaggtgtggatcacctgaggtcaggagtttgagaccagcctaaccaatatggtgaaaccccatctctactaaaaatacaaaaattaaacctggacgtggtggcgggagcctgtaatcccagctactcgggaggctgagaaaggagacttgcttgaacccgggcaacggaggttgcagtgagttgagctcataccacttacgctccagcctgggcaatagagcaagacttcgtgtcaaaaaaaaaaaaaaaaaaaaaggagatacaaactgatttcatatttcaacattttgatgattcagaagctgatgtattaatacattttcaaagtagatcaataaacattttaagaaaagttattttttcctttgttttagtagtagtctgaatattcataaaagttcatttttggggtcagattgattcattgagcccggtatggaaaaacttccttgtgtatttaatttcatttggattcccctttaagaagctaatagccatattccaaatgtgcataaaactgtcaagttaataggaagaataccgaggattcttagacaaaatagaagaaaaagaagagaaagaaaaatgactctgctctaggaggaacacagaactggaaactaatgaccattttagtacctataatgtggcaagcattccctagttttggaattgacagtaccctctaagaagtttgatagaggtgtgcatgaaggagggagcctaatgcagatttggtgtgggttagagaggggtgtattgaagggcccaagaggaaggatgtcaggaaatatttctaagagaagaactcgagcctcacatagccacacagacaaggcgaaagagtatcagacaaggtgaaagaatgagccaaggtatggaagtattagacaacgttaaagactggggatctatagacattcagtagaaatgattggtgaatgaggaaatggaaagtagcatggtgaaggatgagattggaaaggactgttgggtgtcaaatattaggggccttgtgttaccaggctgtcaagtcagaactttgccctgatggtggcagggaatccctgaaggaagctctttgatttgttagctgtttctattaaccactcttgccccactaaagttaaagatagagatagagatagatagagaggagggagggagggtatgagtgagagtgagagagaaagagagagacatggatggagtctagcttgaaacttttctgtgaattttaattttacaaggatttttggtttttgatatattgtatccaaaggcagagaaaatatgaaggttatcttagaaccctgacattagaattttaaaaacttaactctggttttattccaaattttggcaaagcatctcatttcttttagtcccacttccagttcagatacaattaggttcttagattcttgtttttgccctatccctttttatcaaggtggctttgggggatactatggtgtgctttggggttggggtagaggtgaaagtgcctggagaaggcaagcaggcaagctaattgccatcaaagcagcaataatggctaaatgagtacttctgaaattgctccttctagaatgtttttggagaaaatgttgggagagtagagtgttgtaattgaaaaggatgattttctggtggttgaatttcagcactctgtaacctggatggataaaaatgactctatgccttacaagtgaacctttctgtttactcaatgaattgaatctgtaatggaaaagataaagtttgttggtaatgtcagattcagttcttctttactgttcttagagccattgccttattcttttaaagaaaaaattattttttttaagagacagggtctcactatgttgcccaaactgaagtgcagtggctattcacaggcaccatcatagtgcactacagccattaactcctggcctcaagcagtgctttcgcctcagtctcccacgtaacttgaactacaagtacacatcactgcatctggccattgctgtattctttaaggatcaattatgtcatgttgagttggtttccttgcttccattgtctcccaactgtagtcctagattagctttttaggttattaatcttaaaacatgatttttagcatgttactccattatttaaaactccatagtagcattttgctgtttgggttccacagagcctctgggatattctctgtgaagagggagagcagggtttgggaagtgctggggagccaaggctgacctaataaggcaaatcatattattagctcatattgtctaaataaaacttattttacctggcagttatgcttcactctgaaattacctgacaaataagtccctcctaaaagattgtgtattaaatgtagatagttttgggttgatgaaagtggcataccagggtttccagcaacacttactctgccatttgggagagagggggatgcttgtcaagcaaatagttgttgcataataactgatttttggccagtcatggtggctcacttctgtagtccctgcaatttgggaggctgaggtggatggatcacttgagcccaggagtttgaaaccagcctgggcaacacagtgaaaccccatctctacactaagtacaaaaattaactgggcatagtgttgcatgcctgtggtcccagctacttgggaggctgaggtgggaggatcacttgagcctgggaggtcgaggctgcagtgagctgtgatcgtgccattgcattctaggctgggtagcagagtaagaacctgtctcaaaaaattcaaaaaactgattttctcatatctctttgacagtggaccacgtacataataagcagaaagaggaataaaaagggatcttgcctttaaagatcagttatgtccagccttccaaaactgcactgatcagtaccaccagagtactcagagagttgctgtttttgctgaaagggtgattctaattatctggcagattttcaggtacgccagtggcatgacctaaccatcggcctgtattattacataaccagcgtgtattattgattaccagggcaggtcatgctattgaccgattctagctcccaggccagtattgatttgcttttggtggaagaaaaggaatgaaaatattcttgaaaatcaatatgtcaaagaatataacaaagaccaatggagctaaaaaaacaagataaaacaaagctgagtttatttatttgccaggtaaggaaatatagtaaggattttacatttgccaggtaaagaaatatagtaaagaaattcagtgagtaattgttgaggaagaaaagtctggattttagtactagaaaagagcagtggttagggtaggtttggagtagttatccaaattaagtattgaaaaccagcattttggataggatggcatgaattcatagatctgtatatgattggttgaaataagtcccattctagtgaaacagcatttagtcttggtatcttgtaggcaagtcctgctgtaaacggaaaagtttcctgttacaagagtttctggcccgttttctaaagctaattagatctcttatgaaggtcctggacctaaccaatcctcttaagggtccctattggtgtattctatgttggatgggcccttgggttggcagtgaacagttcttactctagatatacacttctagaatatttgcagcaaacccctgaatctctatatattggatttcgggaaccctagcctagtatgtccagctagaaaatggcttccctccatgtataccgttcttcccagagggtatagaattgtaagtatgagggtgtttgataagtgttatttttgttacattgtattcaacttaggatttgtatatatttctagatagtttctttaaagacttaaagtctcattttattcttcaatgagctcttcaaaagtgactcacattctcttacgactttttagttcaatagagaatgctaattcaggttcctcttagaaggactgctagataattttgctccttatgggaaggtcttgctgtggacatccccagatttttgagtttctatttgaaatatatggtattcaactacttttatttcattggagaaaatgtataacttcagattttcagcactatttgtaggttgcctttttcttctttcttgttacctaagtgaacacatttattaccaatataacttgtaatcccactggagaggattgcagtgcttttaggcaatctcatttcagcagatatagctctttaaaaacaaaccagttaaagacagtctcagctgaactacagttgtttcttgtagaccaaggaaatataggggtggcgagcaaaatcctcggacttacacagtccatctcaacaaacatgtttgtgcttggctaaagacatggtgattacttcttttctataaatgatatatgaatgaatccaacacaattcttggtagcagagattgagggcctttttgtagtttgactcagatttcgtcttcaggattatttaataacacttcaaaggtattgtgatttatttgctttccagttgagtttttgacatgtctattttctgaagccaaagagaattgacaatgtgatttttaaaaggatttatttcagcatataagtatgcaatggtattgaccttccaaaaaccactaagacataaaatgttataaagttttagtatatagtaaagagtgtgttagtatgtcagcaaagggaaatattttattttccaatacctttaaaatggaacaaataacaaactctaattaaatataatttgtaatatgtaaataataccgtgaagtagcaagattcctggcagttagactattgaattccgtactctgtaagaagcacgaatttttgacgatcatttcattttgcttttgcttatgacttccactgcccatgtatgtcaaagagagagagatgatctttcaatagtttactaaagaaatgagatgcttcgtaaaattgtcatgtggttggcctttttacaggtgaaataagaattacaaaatgcttgcttgctttatttttatgggattatgtatatatatatatatatataatattgttatacagagtcagtgcagtccttagaaacttacagttttaggaaatgtgatagtcaggcatagttttctttttaaactcatgtgtaaaataatagcatattcaaatgataggctagttgttttgtatgaagaggagagatcactcttggtctcaacttgcccagtctcataggcgttgttgcactggaagaaaatataccacatgtggtttttacatgtccaagctcagtaagttttattaggtgaagtaaaggagttgggctctaaggtgatttttgaatcagcaggtgatacagtagatgagattcaggaagttattccaggcactaaccaggtaagagttgtaaatacagttatgcatggaatgacaaagttttggtcaacgaggaccacataagagtataacattgttggcctggcatggtggctcacgcctgtaatcccagcactttgggaggccaaagtgggcggatcacctgaggtcaagagcttgagactagcctggccaacatggtaaaaccccatctctactaaaaatacaaaaattagccggatgtgatggtgcacacctgtagtcccagctacttggaaggctgaggcaggagaatcgcttgaacctgggaggtggaggttgcagtgagctggaggttgcagtgagctgagatcgtgccattgtactccagcctgggcaacagagtgagactccatctcaaaaaaaaaaaaaagagtatatataacattgtatttttcccataccttgtctatgtttatctgtaattgtgttttactttattttttgagacagagtctcactctgttccccaggctggaatgcagtggctcaatcactgcccactgcagactccacctttctggcttaagcaatcctcccacctcagcctcctgagcagctgggaccacaggcatgtgctaccatgcccagctaatttttaaaacatttttgtagagatggggtctccttatgttgcctaggttggtctcaaacagggctcaagtgatcctctcaccttggtctcccaaagtgttgggattacaggcatgagccactgcccccagccccttatctgtgtttagatacaccaataccattgttattgcctacagtattcaatatagtaacatgctgtacaggtttgtagtctaggagccataggctctcttaaatagcctctgggtatagtaggctatactatataggtttgtgtaaatacagtctacgatgtttgcacaatgatcacctactgatgaatttctcagaatgtatccctgttggtaagagatgtgtaactgtaatacagcttttgttaaaggcatgatttctttcaaataaaaaagtagaaaatagcttacataaaaaagccttaaaaaattcttttcaaatggaacaatctttgtgaaggatgcttgtgtttttaaaatgagaattatatttgcactataaaatatccttattgtgtcagagtttctgtatatcataaactactctttaaatttttcattatgatgattaaataataaataatattcaatttagaaaaccagaaaagtgtatcttcgaaatatgctgtgggatgtagagggattgaaaatgtttccagaaagaggctgttcaggacaaggaaggatattattttggatgttagaccttctcttaggagagaggtgatatttccttagccacaatatgaggaggagagttctgctagggtaggtatattctgaaggactgtttttagtaaagaacctcaagagcaggtacttcccccccacccccttaaccaacttcctgggaaatatagagcaggtagtatttatgtgagaaggaacttggagaaagataaactcttcccttaattttccttgttttccccattttcacttattaatcttcatttagccaagtcattaacttgtttgttaaatgtttgttgtgtgcctttgttaggtatatggtaattttttttattcatgctcatttattcagaagagtttcaagttgcctgatttttttaagtgaactgtacattttcttttttgttatgtgtgttcaaaaaagttggagaaaggttttttaaaataaattgtgataatcaaactcatttatttttattattacatttatttatttatttatttatttatttatttatttatttatttttgagacggagtctcgctctgtctcccaggctggagtgcagtggcgcgatctcggctcactgcaggctccgcctcccgggttcccgccattctcctgcctcagcctcccgagtagctgggactacaggcacccgccaccgcgtccggctaatttgtttttgttttttttagtagagacagggtttcaccgtgttagccaggatggtctcgatctcctgacttcgtgatccacccgcctcggcctcccaaagtgctgggattacaggcgtgagccaccgcgcctggcctattattacatttatttttgacttatatcggtcctgattgaatccttttacttgtggatctaagtgcttaatttttgatcatttggatcaaagtgagtttaatgaaaatagaattttgtgatagctcttaagccaactggctacatccttgatttcccaaatcagggtcagaagtgtaattactaaattatattgttttccttagatattcagatagtcacattcattggaatagtagatagaagccttaacttcatccatctagtacagcttatacaccatggaacttcagtgctaccttggcttactttaactacattgaggccatctggtcagttagtggggtgtagtggccagcacagaggctgttgggtagtcaactatgagtttgaatctttgccacttactagctgactgtggcgagattatttttaatactaactcatcatcagtaaggtagggatgatagtatctgccaagttagatggttgtgaaaattaacaatttaggtaaagcaccttgcattctgcctgggatagtatataggtgttcaataaatgatagatactgtaactattacttacattttctttgtatatattttctgcttaaattcatgttagtgctaataaccaaaataatttacctgattgttttaatttaagattagtgggactttaaaagcttttcttaaagttgaaatacatcatggtctttaatttttctcctcttttctaagtttttactttaatacaaataccaaaaaatcagaatggtttttcttaatttgtccttagtaaacacattatgcttcctgtttgagattttgtcaccttgtagaatttttcattaatacagtatatagcacagcagggttttgtttttgttttaaattaaagattgatcttaatgagatagtgttgaaattagataagcttctcttgctgctatttatcccttccatctttatttttaacattttaatcatatggctctctgaaactgcctacagcatgaataaaagacaatttttctaccagaaaattttaaagtattaaaaagtgatatttaaagtatttaccagaaaggaaggagcctaaaaagattgttatatcaccatttataagttcaaaattcttattattgaagctacatgttcatccttccttcagctacacacttgctcccctatggatgttttaaagactctgtcaccaccttagcaatattctgagtaacttgattttagtgtgatatatattttattgatgactttcaaaataattatacattattgaacatttaattattaaattataaagataaactctgattttacgttctaggtacatttctgtgattagaaaattctctcatggtattctgtttataattaatatacctagtaaaactaattagaagtatctgaagcccctagcaaaatctgtaattagacatgccatttataattaactgactcttctcattcttgccttttcctctccatttgaattaatcactgtgctcctcctttagtgatacttgtgttcctatccaagacactgattagagtttaatgatcactgtttgtgatatgttatggagacttactttatagaaactttgcttttaaactttatttaaaaacattaaaaatacttgaattatattctctataaagtatcacattgaagatttttttgcacattatcaagataagcatttattttatcaaatgctgaaggcaaacacagagaatagacagacttgaccattttcttttctagtactttagtatctggatttttcttgacagtctgatcactgatcattgtctgcatagttttgacagcatgcccattgaccctgggccattgatagacctggtatgtcttcatttattattttgccaaagaattagaagcctgataagctaggcagtgtcctgtgctttggctatgaagaggcaggagtgatatttaaagtatttaccagtaagtacaaaatagggaccaaccagttaagatggctgtagcactggatcacgatcttgaagaaccccttcatcctttatgctgtgtcaggctttcttgttttacctgctgggttgtagtggtggtggggagactgggccatcagtaggcaccttaggactggtggagtttgaggcagtgacacgttaccagactatgttacggaagtatttccgtacttaagtatgacccttcaggctctgttggtgtgtaccagttcaatattagttctgccaagaggtgttcagtcattgcctgtagagagcttactgttctctaaccataagagacagttatgatatagtttgagaggtacttatgtaagtatataaacgtgcataggggaagattgcatgcatcttttttgggaaaaccagggaagacttccataatgagtagaaacttgccagacaggtttaaggaggagattctaaacaagcaaaggggaaaataacaatttcaaaggcataggggcataagagagcatagtggattcagagatcaacagttaggagcaggagaggatgaagtttttctctgacacttgctttttaaattggataaatacatattaagatcacatttatagttttgaaattgctccatttttgatagatgtattagttcattcttgcactgctataaagaaatacctggactgggtaatttataaagaaaagaggtttaattggttcatggttcctcgggttgtataggaagctggccatctgctagggttctggtgaggcttcaggaaacttataatcatggcggaaggccaagggaagcaggcataaagagagagagagagagaggaggaaggtgctacacacttttaaacaaccagatcttgtgagaactcttatcatgagaacagtactagggggatggtgctaaaccattagaaactgcccccatgatccaatcacctcccaccaggccccacctccaacattggggattacagtctgacatgagatttgagcggggacacatatccgaaccatatcagttgagaactgctagcctgtctgatacttaggttcttcagccatatctaaactattttagatacagggaaaggtagaataggaatttgttatagttcagggctatactaagcattcatagagtaagagtgtgattaaaccctcgcttctgattcattgagaggcttctaatgagcaaacacagattcaaacagattgaggatggtagtttttttaatgacataaaactgctgcccatgaggctttttggctgacatcatgaaactaattttgcttaatggctatggagggctacaaattcaaatgtgcagaaaatgcagtaaattgctggcctgtcagattcttgttgcctgtcatcttttatctgaatggcagcttttgtatccagattgtcaggagcaagtatgtggacccctttaaggttatatttgtacatgcttgaataattcaattcagagcctactaaatatagcaaatcgacaacagtggagcaatgcatcttcttatacttgtgtaattagggaacacatctattggatatctcttctcgtatcagagaactcttgaaataagtcaggctttctaagttctgcttttattgccagagttgttgccttatacctttgaaatatagtgaagtcatggagagcagagaaaacattttctctatgactgttcaactcaatgagtgattttaaagtacccattatgtgctaggaattacgtgaaatacaaagatgaataagtgactgttttctgttttgtttttagttttatttatttttttgggacagagtcttcctctgtctcccgggttggagcgcagtggcgcgatctcaggtcactgcaacctccacctccttcaagcaattctcctgtctcagcctcccgagtagctgcaattacaggtgtgtgccactgcacctagctaatttttgtatttttagtagagacggcatttcaccatgttggccagactggtcttgaactctggacctcgagtgatcctcccgccttggcctcccaaagtgctaggattgcaggcgtgagccactgcgcccagcttctgttaatcaaattatatggtttccttcctcaagctgtatttagaaaaaaatgtcatgatgatgatggtggtggtggtggtggtggtggtggtggtatgtgtgtagtgttacaacaaaggctacaataaagatctgagttacatgtgaatagattatttgcttcaaagatggttttgaaataattgttttaagttttttgatggcttcacttttacaacactttcaattaatgttccttatcttctctctactttctattatactgcataattaaaggaaggaatattttcagtgaaatatatattatgttccaatattattaattcaacaggtatttaggtagcatctactaggccctaggtttggagtgaaccagaatgtgaaaggttgctatccatagaataaaattacttagtaaaaaggtaaccaaaataatgaagtttttactttcagcccttttggtttgattaatgatatgaaaataacataattcagccttaaagtcacagaatttatatttgattttgtagatgtgttggatttttctttctttctttctttttttttttttttttgagacggagtcttgctctgttgccaggctggagtgcagtggcgcaatctcagctcactgcaacctccgcctcctgggttcaagcgattctcctacctcagcctcctgagtagctgggactacaggcgtgggccaccacacgtgattaattttttgtattttagtagagttgggatttcaccattttggccaggatggtctcgaactcctgacctcattatccgcctgcttcagcctcccaaagtgttgagattacaggcatgagtcaccgtgcctggctcgatgtgttggatttttatgttcacaaaagttatctgaagacatatgcagaaatagactgtctccattgaattttgattaactgatcagcacattaaatctgtgggttttggtaacattcaaaattatgggtaggcaagggactttagaaattgagggcattctctgtgtcatcacttggttagaggcaaatctagggaaacaaaaagatgagaatcactactataagaaattatcccttttatacctttgctcatttccactgcctggaacgtccctttttcttctctgctctttctcatatcttactcaaagactttcccaaggtggtacctaaacattttcccctgaggtgacattttgcttcttggaattttataacattttatttattacaactttcaagatttttaaaacttttttgtgtgtacctgagctctgtttcctattggattataagctttccaaaggtatcatggatgtcaaattgggccatgaaggatggaaggaatttggataggtggagaaaggaagtcatgtccataggagagaaaccacatagaccaaggtccataggacaaaacagatgctttttcaggaatgctagtagcttaatttgcttggtttagagaatatcttagtagagtagagggagatgaagtggggagatgaagtggggagaataggaaatgatctttgatgctgaattagtaaaatatgaaggtcatcagcacttcacttttagttgattagttgtgtgtaggaaaggctcagtggagagttggaggagagtgtacttactgtgttgtacctctttttttaattcccagattacttcactaaaggaaaagggagccagtgttgtggtgagatgtaaagcacttttgacccaggatacagtagatccagaagatggaaacctatgagccatagtcagcgcctttgcaatatcatgggaaggaaagatggtcttcatgcctccttccagttctaatatactatgatgccatggcacagttcaaatctttggatcagagccaccactaagacctgtttcatccatttatgaattatttagttcagaagtcagcagacctctgtaaagatcccctttaaacttttaaactttgtggcaatatactacctctgttgcatattcttgtttgtttatggccctttaaatacgtaaaaaccattcttagctcataaatcagacaaaaacaggccctgggctggatttggctcttaggctatagtttgatcactgatttagttgattagggtacttgttcctgcacatatggtttctagaatttagaaaaccaagaccaacttggtgatggtgttttcccatctgtctgtattttcagtgacgactcataggttgtattttctaagggtcgagaagctaatacttaacaagaactctccatttgcattcctgtagtgttggcaattttgtgttttgggtttgtgctgtctttctaagtgctatgaaaacttcctggtgtctgagtctatccatctttactatctgtaccgtgattcacatacaaatattttctgtgttgtatccttaatgtctgagactattttactcatctttactagctgtaacctgattagcacacattattttagtgcttcttaatggttatcagtataaatagtgcattttatttgtattttattgtaaattatgaagttttatactttttgaatacaacatgtaagtgcaaatgtcaaacttgagaaggcaacatattgtatagttataattaaacatagtgatttaatttcagtgatcactggtttaaaatcagttctggattagattcttctatatatgttctttctcttttgcttcatgtgtattccctataatggagtagttatctcagatttttctgtcatgagaagttagtgcatatagtcccctgcatatagtcgtaatcccttgtccccagtatcttgaattgctacactcactgctgaacatgaaacaagtattttctcactatatttttacttgttgattacaatttgttaatgatatgtatccagtgtttctatttgattaatcaaacacttcttgctctttgcttaatgctttgtctccattgtcttacttattgctttctatgtttcatttatatttttctacaatttcttagagttttaaaccctcaagcagtttttatagtggtaaaacttttaactcttttttttttttgagatggcatcttgctctgtcgcccaggctggagtacagtggcgtgatctcagctcactataacctccgcctcctgggttcaagcaattcccccgcctcagcctccctagtagctaggattacaggcacctgccatcacgccctgctaattgtttttgtatttttgtagagacggggtttcataatgttggccaggctggtctggaactcctgacctcaggtgatccgcccgccttggcctcgtaaattgctgggattacaggcatgagccaccatgcctggcccaaaacttttaattttttaagtaaataaatgctcaaaactcataacatttttaaatgattagttatcaatacatattcttataaacacattcacacattataatacattctaaatatatgttatatattacatattaaacactgtagaaaatttaagcttattttcaggaagattaggtaaacagataatcatgaatccaaacagtttttatagtcacaacttacctgtcatttgccagcgtaaagattataaacagatgtggtttacagatgatagttgatgcttccacattcactggcaatggtgatcacttgaaagccccatctagctgaaccttggagaaacatacccaagcttggaggtatccctctaccacttagaatgctgtttgtacatggaggcatgtaatgaatactgaatgaataaattattaaaacctcaagcttattctaggcttaagctctggttctcaataaaataccaccaaataaacataaaaatacgtacttacttagagcattttgaaagtacataacttaaggaaaaatgaaaactacctatgtaatatttatgcaaagcaaagcactattaacattgtatgtatttgtagcctcttctatgcaaatttatgtattacacatttcaaattacccaacagatgagcattttcctatcattaagcatttttattttacttttaaaatccactttagtaaaattatttatgtgcagtacagtttgaggggttttgactaatgtgtatatcctgttgacaaccgccataatcaagatatagaacattttaatcactcttaaaagcttctcttaagcccctttgcagtcaattctttcatacaacctttggttcctgcaataacttacctactttctgtcagtggagattagttagttttacctgttcttgaatcgtatacatgaaaaaattgagtagacagtacagagagttcctatgtatgccctttacacagtttcttctgttagtcattaagcatctttgataagcagttttaatgattgcttaatattctagcttatttagcaaatcatttgtacttttagtttgcttctagctcttttttgagatggagtctcgcccggtcgccaggctggagtacagtggcatgatctcggctcactgcaatctctgcctcccgggttgaagcgatttccctgcctcagcctcctgagtagatgggattacaggtgcacaccaccacacccagctaattttttgtattttagtagagacggggtttcaccatgttggccaggatggtctccatctcctgacctcatgatccacctgcctcggcctcccaaagtgctgggattccagaaagattttaccaattgctgggcgtatggatcatgcctgtaatcccagcactttgggaggctgaggcatgtggattgcttgagcccagtagttcaagaccagtcttcgtggacaacatggcaaaaccccatctctacaaaaaatacaaaaattagcagggcttggtggtgggcacctgtgtagtcccagctactcaggatgctgaggtagaaggatcactcgagcctgggaggtctaggctgcagtgagctgtgatcacgccactgtactccagcctaggtgacagagtgagatcctgtctcagaaaaacccgaaaaacaaaaacaaatttaccaatttaaattcctatgaacagtgtacaaaaatgcctgttatattacattattataatattatatattattatattacgttatcacttgtagctgtcagtatagcctagattgtgctgtagtaacaaacagtcctaaaaatctcagttgcataatacaacaaagtttatttcttgctcatgttacatgtctaatacatgtcagcagggttgtttttttctcttcagagacatttagtgaactccataatgactgcagtagctgggaggtctgtaagttgtgtagttggtcttaaagcttatacttagaaatgtgtaacatcacgtctgtgtacatttcagtggctaaagcaagtcatgtttctacacctaagttgaaagagggcagtgaggtgcaatcttaccatgagtctggtaaggagaagaactggaagggtgccaatgactataatcttatttttaaaacaattataatttcattgatcaaagatgatatctcattttaatttcattttctttgctaatgtagagaacattttttccatttttcatacttagtagacattggttttatttaatttacttatttgcttaggttttataaacatgtgctattgatttacttttacatttccagatttttaaattctgtattttctatgaggatgggcaatcataatatagggagtgtaaactgtagaaaatactttcttttgaagaattgagttgatgaaggagattgatttttttctcctgtttatgtagtacatgttttggtatcttttttttttttttttttttttatgagatggagtcttgctctatcgcccatgctgcagtgcagtggcatgaccttggctcactgcaacctccgcctcccgggttcaagcgtttctcctgcctcagcctcccgagtaggtgggactacaggcacacaccaccatgtccagctaatttttttgtatttttagtagagacacggtttcgccacattggccaggttgctctcaaacacctgacctcaggtgacccgcccacctcagcctcccaaagtgctgggattacaggcgtgagccgccgtgcccggcctgttttgatatacttttaatttcaagaaataccaacattaatcaaaggcaatagaaagtccaggagaatttcttaattcttgacattctatagatatctaaagaacagcttggacgtaaaaatttaggaggtaaatgatcaagttagggttctattgaaataattaaatttccatactcagattcaaccatattgaccatgtctttttctgtttgttttttacaattcaggtatctgcccaaactggaacttatgctgtagacatttctttgtggtttatctaaaaaccaaag

SEQ ID NO: 1646 - DNA, 605 bp, Homo sapiens
  full length sequence of bloodCirc_20064
gaacattttagtggacaaaccaaatgaccaatcttcaagatggtcttcagagagcaactatcctccccagtacttgattctaaagctcgaaaggcctgctatagttcagaatatcacatttggaaaatatgagaaaactcatgtttgcaatttgaagaaatttaaagtctttggtggaatgaatgaagaaaatatgacagagctgttgtccagtggcttaaagaatgattataacaaagaaacattcaccttgaagcataaaattgatgaacagatgttcccttgtcgattcattaaaatagttccactcttgtcctggggacccagctttaactttagcatctggtatgttgaacttagtggcattgatgatcctgatatagtacaaccttgtctcaactggtatagcaagtaccgtgaacaggaagctattcgcctttgcctaaaacacttcagacaacacaactatacagaagcttttgagtcactgcaaaagaaaaccaagattgcactggaacatcccatgttaacagatattcatgacaagctggtgttgaagggtgattttgatgcttgcgaagagttgattgaaaaggctgtaaatg

SEQ ID NO: 1647 - DNA, 387 bp, Homo sapiens
  full length sequence of bloodCirc_06896
gatttccatttaaacagggttaatttggaagaatcttcaggagtggaaaactctccagctggtgctagaccaaagagaaaaaacaagaagtcttatgatttaactccggttgataaattttggcaaaaacataaaggaagtccattcccagaagttgcagaatcagttcagcaagaactagaatcttacagagcacaggaagatgaggtcaaacgacttaaaagcattatgggactagaaggggaagatgaaggagccataagtatgctttctgacaataccgctaagctaacatcagctgttagttctttgccagaactccttgagaaaaaaagacttattgatctccatacaaatgttgccactgctgttttagaacatataaag

SEQ ID NO: 1648 - DNA, 694 bp, Homo sapiens
  full length sequence of bloodCirc_13805
gtgggaagaagagcgctatcctgaaggcatcaagtggaaattcctagaacataaaggtccagtatttgccccaccatatgagcctcttccagagaatgtcaagttttattatgatggtaaagtcatgaagctgagccccaaagcagaggaagtagctacgttctttgcaaaaatgctcgaccatgaatatactaccaaggaaatatttaggaaaaatttctttaaagactggagaaaggaaatgactaatgaagagaagaatattatcaccaacctaagcaaatgtgattttacccagatgagccagtatttcaaagcccagacggaagctcggaaacagatgagcaaggaagagaaactgaaaatcaaagaggagaatgaaaaattactgaaagaatatggattctgtattatggataaccacaaagagaggattgctaacttcaagatagagcctcctggacttttccgtggccgcggcaaccaccccaagatgggcatgctgaagagacgaatcatgcccgaggatataatcatcaactgtagcaaagatgccaaggttccttctcctcctccaggacataagtggaaagaagtccggcatgataacaaggttacttggctggtttcctggacagagaacatccaaggttccattaaatacatcatgcttaaccctagttcacgaatcaag

SEQ ID NO: 1649 - DNA, 322 bp, Homo sapiens
  full length sequence of bloodCirc_15234
aaatgggacgtcggtcatcagatactgaagaagaaagcagaagcaagagaaaaaagaaacaccgtagacggtcctcctcgagcagttcttcagatagtagaacatacagccgaaagaaaggaggaaggaaatcaagatcaaagtcaagatcttggtccagagatcttcagcctcgttcacattcttatgatagaagacgcaggcatcgatcaagcagtagctcttcttatggctccagaaggaaacgaagtcgaagtcgttcaaggggtcgagggaaatcctatagagttcagaggtctaggtcaaaaagcagaacaagaag

SEQ ID NO: 1650 - DNA, 4137 bp, Homo sapiens
  full length sequence of bloodCirc_18114
gaatatatgtattctgatagctaatcttatggttcccagtgctgaagagggcttacaggtaatcactgtcctaaataccaaaatgattcttcatagagatggctttccatgattattaggtggttatgatgtaatgaagactcataacaaaagtgggtggacaaaagtgacctgtacagattcagagctgctttataaggagtaagttcatggtggaattgaatcagaccaagtgaatcagaacatacatgctcttgacatacctaagaatccttgtcacagtaatgaaaattttccaggttttacaggagtaaagtacttttcagtagttgaacgattaaaattttgtatttaacagcattttgtatatactgaaaaacaatggtaagatgtttcccaatcttaattacttgtgtgcaaatactttcatacattttttattataaataatcataggattcatagtttaaataaaatatatcatttctttgaaattaacttactgtatttgctaaattttcattttaatgtctttacgtaaattggattgaggttaataatatataaactcttgagtattttgtaatcctttaaaaatcagccctctaagctatgttaatgtttttctgaagactgtgcataaaagagtcagccatagatatcttaaatcttcagatgcctgagacctatgtcgttgtgtatcttaagtatgattgattagtctaccattttaattatttttacaaagcatatttcctcaaaaatatagaaatcttaggttatattttttgaatttctagagtcttataaaagtttaagggataagcataaattgataaagcatcttattcatgagatatcaattggtttgccctgtggcagaacataaagatgatttttgaatggcagaacattctaaaagaggattctataaacataaatttagtattctgatttcttttttaaggtattgatgtagaaaacttcctataaattcttaccatgttagttttaactggtggaaacaatctaatgataatatattatactttagaattaaaatggtagtgttttgcaaatggagcatgtgtggtgatagatttgactggacaactgaaggagcagaaggacttagttttacaaaatataactaacaaatatcttaagtaaattgcggttatatttgattagattttaaactggcaagaactgctacttcccactttaaaaagaaaacagtggaactttgctatatagaagaagcattaccattaggaaaaaaaaatcacaacttggttctctaacaataaggagccatttttcagttgtcagtttgacttttaaccttgtgataccatcttccttatatgatatatcacattagtgaatattgcaagagaatctagagattgccttgttaaaataaataacagtgacttttaaaacatactcaagcaattcagcaaataaacaaaaggaagccaaacctcaaggtgctataatgtaaccattcccaagacctaactggagatttaatttatagaaaatgactagctccctcttaagtcagaaatggaatcatacacagaaatatatagatgttaaaaataccttcacattttattgtaatggtgaatttgtgtttgtgtgtgtgtttgtctttacatttcataatactgtaaattatttctttctgagaccagaatggatcccagaacattataactttatatcgaagagtaggaactgtttccttcagtggaagttgcttaagacaggattctaatttatacctattgctccctgattttaaattttctatacctatgaaatctgttgcttccttattttaaatttacttctatctaacattgtggttaacttttaaactcctttcacacttttaacacttcaaagaatttgaattattgattaaagttaaatgacaaattattaaattctttttttaaattcattttttcccaatggcatggtatatattttctttcttttttttccatacttatcttagatacagtaaaaacttatatttcctgtttggtatattggcagatttggagctctttatggtttttggctaacagttaaaagtaacctgagtgagactttatgatttgtaactggttgctttattattaggaaaagaatctgatttatccgtgacatctatgaacataaatatatgtttgtatttggtacattataagttctattcattttatattcttacacttatttatatccttaaagagtatgcagttaaattctttttactatatttattgagatctctcaagcatatttcttcaaaccttacctttcaaagtattgtgtcattcatgcttactattttatgtgtacatatttgcatttgcattttactccattttaaaaacataaccttaaaaagataaacaacgtccatagggtttttaataagataagaatacatgtctattactgatattgatatttatctttaaatttcagataagcctttgaaaaaaagaaaacaagattcttacccacaggaggctgggggtgctacaggaggtaatagaccagcttctcaggagacgggttctacgggaaatgggtcaaggccagcattaatggttagcattgatcttcatcaggcaggaagagtggactctcaggcttctataactcaggattcagactccataaaaaagcctgaagaaatcaaacaatgtaatgatgcacctgtttctgttcttcaggaagatattgttggaagtcttaaatctacaccagaaaaccatcctgagacacctaaaaaaaagtctgatcctgagctttcaaagagtgaaatgaaacaaagtgaaagtagattagcagaatctaaaccaaatgaaaaccgattggtggagacaaaatcaagtgaaaataagttagaaactaaagttgagacccaaacagaagaacttaaacagaatgagagcagaacaactgaatgcaaacaaaacgagagcaccatagttgagcctaaacaaaatgaaaatagactgtctgacacaaaaccaaatgacaacaaacaaaataatggcagatcagaaacaacaaaatcaaggcctgaaaccccaaagcaaaagggtgaaagccggcctgagactccaaaacaaaagagtgatgggcatcctgaaaccccaaaacagaagggtgatggaaggcctgaaactccaaagcaaaaaggtgagagccgccctgaaactccaaagcaaaaaaatgaagggcgacctgaaacaccaaaacacaggcatgacaataggagggattctggaaagccatctacagagaaaaaacctgaagtgtctaaacataaacaagatactaaatctgactcacctcggttaaaatcagaacgagctgaagccttaaagcagagacctgatgggcgatctgtttctgagtcactaagacgtgaccatgataataaacaaaaatcagatgacaggggtgaatcagagcgacatcgaggggatcagtctagggttcgaagaccagaaacattgagatcctctagtagaaatgaacatggcattaaatctgatagttcaaaaactgataaactagaacgaaaacacaggcatgaatcaggggactcaagggaaagaccatcttctggggaacaaaaatcaagacctgacagtcctcgtgttaaacaaggagattctaataaatcaagatctgataaacttggttttaaatcaccaactagtaaagatgacaaaaggacagagggtaacaagagtaaagtagacactaataaagcacaccctgacaataaggcagaatttccaagttatttgttggggggcaggtctggtgcgttgaaaaattttgtcattccgaaaatcaagagggataaagatggcaatgttactcaggagacaaagaaaatggaaatgaaaggagagccgaaagacaaagtagaaaaaataggattagttgaagatctaaataaaggagctaagcctgtagttgtgctacaaaaactgtctttggatgatgttcagaaacttattaaagatagagaggacaaatcaagaagttcccttaaacctatcaagaataaaccatcaaagtcaaataaag

SEQ ID NO: 1651 - DNA, 545 bp, Homo sapiens
  full length sequence of bloodCirc_22270
gtacctcatcgcccatccttatcaagcttagaaacgttaatggtttcacagaagtctgaaattgagtatttacaggagaaactaaagatagcaaatgaaaaactgtcagaaaacatatctgccaacaagggtttctcccgaaagagcatcatgacaagtgctgaaggaaaacataaggaaccacctgtgaaacgttcaaggtctttgtccccaaagagctctttcacagactcagaagagctacagaagctgagaaaagctgaaagaaagattgaaaacttagagaaggcactacaactaaagagccaagaaaatgatgagctaagagatgcccatgaaaaacgcaaggaacggctacagatgttacagaccaactacagagcagtaaaagagcaattaaaacagtgggaagaaggcagtggcatgactgaaatcaggaaaataaagagagcagatccccaacaacttcgacaagaagattctgacgctgtgtggaatgaactggcatatttcaaaagggaaaaccaggagctaatgattcaaaa

SEQ ID NO: 1652 - DNA, 321 bp, Homo sapiens
  full length sequence of bloodCirc_09250
gagtgacagtgaggattcacatttgggttatttcaagatgagcttcctactgcccaagctgactagcaaaaaggaagtagaccaggcgataaaaagtactgctgagaaggtgttggttctcaggtttgggagagatgaagatcctgtctgtctgcagctagatgatattctttctaagacctcttctgacttaagtaaaatggctgctatatacctggtagatgtggaccaaactgcagtttatacacagtattttgacatcagttatattccatctactgtctttttcttcaatgggcagcatatgaaagtggattatgg

SEQ ID NO: 1653 - DNA, 273 bp, Homo sapiens
  full length sequence of bloodCirc_18068
gaaaagtaagaagcttaagcgcatctttgtggtcactaactcacctgacagctttgcatttgagtgacaattccctgtcccgaattccttcagacattgccaagcttcacaatctggtgtatttggacctgtcatctaataaaattcgtagcttacccgcagaactcggaaacatggtatcactcagggagctccatttaaataacaacctgttacgagttctaccttttgagctgggaaaactgtttcagttgcagactttaggcctgaaag

SEQ ID NO: 1654 - DNA, 386 bp, Homo sapiens
  full length sequence of bloodCirc_21532
gattaatttatttttggaaatcaagtgcaatattggaagccatttctactaattttatttcacttttaaatttatgatttgatttgaatactatcatgggaggagctgtgagtgctggggaagataatgatgacttaattgataatttaaaagaagctcagtatattcgtactgaaagagtggagcaagccttcagagcgattgatcgtggagattactatttggaaggctacagagacaatgcttacaaagacttagcctggaagcatggaaacatccacttgtcagcaccttgcatttattctgaagttatggaagcattgaaacttcaaccaggattgtcttttcttaacctgggaagtggaaccggatatttaagtacaatg

SEQ ID NO: 1655 - DNA, 198 bp, Homo sapiens
  full length sequence of bloodCirc_10651
cttcaagtggaaataaagagattatttcgcatattagtcaacatggaggaaaatggccttactggtttaaaaaaatggaaaatattcagaagttggggaattataccttgaaattacaagttgtgttgaatgaaagtaatgcagacacttatgcaggaagaccactaccatctaaagcaattaagttttctgttaaag

SEQ ID NO: 1656 - DNA, 407 bp, Homo sapiens
  full length sequence of bloodCirc_13115
ctttccccacaaataaaccagagaaagatgcaagacatgtagtaaaagtggaatatcaagaaaatggcccgttattttcagaacttaaattttatcagagagttgcaaaaaaagactgtatcaaaaagtggatagaacgcaaacaacttgattatttaggaattcctctgttttatggatctggtctgactgaattcaagggaagaagttacagatttatggtaatggaaagactaggaatagatttacagaagatctcaggccagaatggtacctttaaaaagtcaactgtcctgcaattaggtatccgaatgttggatgtactggaatatatacatgaaaatgaatatgttcatggtgatataaaagcagcaaatctacttttgggttacaaaaatccagaccag

SEQ ID NO: 1657 - DNA, 309 bp, Homo sapiens
  full length sequence of bloodCirc_18933
taaatggaaatgttttctaacatataaaaacctacagaagaagaaaataattttctggatcaaattagaagtctgtattatattgatgtctccagattcaaatatattagaaagcagccgtggagacaaccatcttcattttgggagaaataactaaagcccgcctcaagcattagaactacagacaaaccctgatgcgacctctccagattgtcccaagtcgattgatttcccagctatattgtggcctgaagcctccagcgtccacacgaaaccagatttgcctgaaaatggctcggccaagttcaa

SEQ ID NO: 1658 - DNA, 26641 bp, Homo sapiens
  full length sequence of bloodCirc_22782
atggcgttcaggaagtggcttatattcactcaaaccagaatgtaattggatcgagcaaagctgaaaatcacatgagccgatgggcagcacatgacgtatttgagttgaagcagttttctcagctgcctgctaacatagctgtttgcagttctaaggtaagaaaaatatagggtagtatcatctttagttacctcatttttcacagaagttactcaataggatcttctctaagtactccctcaaaagtagcaacaaaaactgtaagtgacatacaaataagtgtaaaaatcaaaacaccatttgggaactgtagtcattgaagacgttttagattaaacaacaaatttatacccaaatacctaatcatgttgagttgcttaatagtttctctcaataaaaattggccagtactcccaaaatgaaaaggaatctgagggaatcatgtagttcaatcagaaccaaaaccatttctgcttatatggaaaaaggaaagtgtgtgattaggttgctccacaatttttcacctaaaatgaagaccaacatagaaaactcatttcatatagaatttatatttttagcaaaagggtttttatactgttaaaagtcataaatacttcctatgggctcttcccacttaaaattgctgttgtgatatttttgtttatacatagtcactttcatcaaaggtttttaaaaaatattttcttgtgtttggcttattattctttattattttctaagagctaagtgcctcaggagtaattttactattactttatgggcaagagttcagaatgcatactgtatataataccaatattttatttcaacttagtgctattatacttttaagaatgaaggtgagggtagaattcctctgaactatcaagggaattaatttattcgtacctcactggtttgacaaaggaattaaattaccttaacaataaaaccagagtacaaaatgaaatttaggaccagagaaaatgcaaattaaactgaaagtttaagacagggagaaagttagaatgcaaatgcatagaacataatatgttctacccagatattatattaaaatggctaattttattgactttcctggtagaaaaacaaaggaggtaagctatctatgtagtgatatctcagctagtgcatgtggaaatgtgtgtgggcagtttgggtggtcacaatgactgaatgcctagctggcattaatgtctggaagccagggattccaaatggctatcctggacaggggactgggttgagggggccaatggggaggcactcccatatgcaaagaattgttctgcccaaaatgccataacaccctgctgagaaaggctgagtgaaatgtttgtccttaaggaaaaagaaaaaaataacactggttctaggagaagcaaagcttttcctagcactcactttgaaggaaatttgtcacttggtgttttttggggaccgcagaacgatatagtgaagagtcagttgtcttataatatccctagaataaatctaataacagactttgaaaggctatcctttctagcatttttcagtgtaatccataggcccagtgccagactacaactcgtgaaagcattctttcatgacccaaatatgctttttatactcatcttctcatttgatccaggaatataccatctctcaaccaacactttaaacagcatttctacagtttgactgccttgtatgtgccatctgaaaaagacaggcggaattatgttgggttttccagaaacttgctttgttaggataaagagtatatcagaatcttttaaacaggtagctaattttttattaggtttttttttaaactgtgcccttttttaaaaccatgtccttctccatacaaacaaattttaatgtgaaaggtcagataatttggcaaaccgctgtagtggatgttaatgaaataactggatatactggtcattagcttatctaaatatttatcagagaagaaatttacaagcatataatttctgcaacaattgatctgagaagcaacctgtttcttaagcaaagttataaaaacgaaaatgctggaaacacagttggcctgtgagctctttcagtcgaaatatttttgaggtggacaacacaatctcattagaaaccttgtctcttcacagtgattttcagagggaggggcatctcttgctaggaaacaaattggaatacctactccctgggggttataatatacccttcgaggccatctatctccctcatcacacatacaccaacttaatataaacccttttcagagaagataaaggaattagctgtttaatgactacattgtggtgaagttttaaagccactaaatgggaggtccattcccatggcaccattgctagcagcccaaacacagtctgcagaaacactcatttcagtggctgacttcagtcagtaattgatacagcaaaatttcattctaacatttcaaagctgtctcacagaatttctgagaaaaaagtgttcccaatcactgatttcatcatatcgcgtcaatattacttcagcacctttaatgaggaaatcattgaaacacactcatcatctttggctagagagatttatgttactcagaggttttgcagctggtgtggcagtgggtggcaatagtgaatttgcagttttgaaaaaaattaaaaagttacgagaagaaaagagaataaacaaagagaaagggaaatgaagcaagaacaaaagagactcaatcatagtgttagaaaattcctgcaaacttcttgatcctgaagtctccaaaaaacctcagacctcccaccgatgttacagtatctttcatctggggctcaatctagaatcttttcggttcctggtaattcctctgagtgcttcatgtctgtcatcacagttttattaaagaactttacttgtgtttggaaagattgtgtgcatgcgtgtctgtagccagttgcagacgtattgtctcagtaagaaaataaatcctatttgttttatgaaatcagtacacaaataacagttgccacagtgtaccagtatttcaatttctaaagaataccatagagtctgaattagaacctttaactagattgcaaaggaatatactaaattgaaaacttgtaaaagggaagtaataaacaccataatcctagataagatcctatggtctttcagagtttttccatatacagtaattatttgatgtacagtaattattgataaccaaaatgacaaaaactgaatctactcttcaaattcaaccatgtatcttaaaaaggagtaaaatgtactgttttcagtgtttcctttggtttcttacagtttataattttataaattaacttcatagaacatattttataaatgttctgtctctcctaacataaattttgaattataccattgttatttgatagtacaaattatgtaaagtaatatgcaaaataagaacacattttgccttaaattgtattttgatattttagaaccatttctgaaaacagctcattttaacaagacgagatgtctgataacagaagagaaaacctgtctgacttaggtttaagctcaggcgaaaaagaagtgttttaagcatttgaaggaactgataatacctttattagagttcatctgttcttttactatatgaaagtatgtcacggagctgaactgtacctgtttgtgatgtgatacctccttttctcagtcaactgcacgttttcaacttaagtttacttaaaattttctgaaaagaaatgtacaaagacagccttcaattaaggattaatcactatggcaactgagatgtggtgactgaagggggaggatgtattctcccctcagtttcctgccagctgtcatagtcaacctctgctgcctgaatccaagccaaaatatagactgtgaccaactctaagaaactatatctgtatttttataaattggtacaagtatcagactataaaagaagacttaatcccttgaattggatgacagacacttggcactcttgcaagtgtttgacagagaaataacgggtcgctttgtagtaaaacctggattaatagtaagcccctctttatgttattgcagtgtggtgtaaatgagagaactaagcatgctgtcagcctggggtgggaggtagcgtgggggagtgtcttttatataaccagtgcaggtttaagcactgttcagaatactgtaaatacaaaatattgtgttagtaagaacttctctttcttgtatttgtattagattggcattctgtagattacttaaaggatttctgtgagctacggtgggtttgattgcagtatgtttatacagcttttggagtcagcaaggagggatggactgtttacagtgagcagactttggggagatagagcattccattatcctgtttttcaggataatgaatggcatgatgctttaaagtaattgttcacaaatggctggtttacaaagtagtccagtaagcaaggtttatggtttcagcatgtaactcttactgggtgggatatttcatggtcttatcatttttctttttgtagctagacagtaattttatggcatttgtatcagaaagttatcctttcaaataattttagtagaaatcaagattttaaaatatgtgtatatatatatatgaaattatgtgactggtattgacacgaaaaaggtttttgtgtttctacacctagaactaggattgattgtagatagcattctgattcagaatataatacgtcatttgagtagaaaatacctgctacttaaaggaaggagaatccagtttttaaactataaacatagagacctattcccctgctagctggaggctacgagaagctgtggcatctttccacacagtgatgataccaggattcatgcactaatgtaactgatgagctgatgtgtgcaaaagacattcaacaccttgcaagaaaggcattgaaattactcaaaaaatgtacatttttattattgtaattatgattattgcttaccaataggggtgatgcgtaaataagtctctacagtagcctgctattatttttgttgctaatagtactcagaatattttagactaccttaaaaagatatctagtccagtcctttaattttatgtgaagtacctgccttgaactgtggctgatttctaatgaaaaatgctatagagaaaaatgtttttgaaaggaattataagctaatttaaaaatggactgggaatgacagaaatgatctttgcttgttaggaagtagtttgattccaactcttctcccagctggtcactgttccaattgtatagaaaatagctataagtcttctttgaacagtttctctgttgagaatagtcacaagatctaaatagttaaaaaatagtagttcttcaaataatgccttcaaggcaatgatataaaaatttaggaatagaggcctcattcaactctgactgactctaactagtggattaaagaatgttacgcacttaacagcccttttcaaattctattttatccttctctgaaaaccatagtatcaattggacatggccccctaatggaaacacctattgccttgtcatctgaaaatcctgcctctgtcttaggaattctgaatttttataggtgaataaagcaaaattacagattaaaggaattacagtatttcagaatttgaaggattcttgaagactatttaacccaaacatctcattttcctaaattttgaaaataagaggataagtaactccctacaggccccagggctcaacaatggccggaggcttacatcgctgtggtctttgaccctttcgtgttttcttgtgcttttccctcaattcctttggtgtctactttgttctggcgatttcaattttacttttccaatatgacaaaccagtcttttaatttttcaagataacttgtctgtgaagaattaccttcactttagcagttacacaaaaacctcacatgggttgaatgtatccttcctttaagatatatatacatacgtatatataaaccatatacataacatatatgtttatacatatatgtataatacatcatatatacatataatgtatatatgttacatatacatacaaatatgtacatctctaacatgtatatggataaagtatatattatatatgttatatatgttatgtaactacatacatgtatgttatgtatatgatatacatgttatatgttatatatgtataaatatatattatatgtgtatatatatatgtaatacatacatgtgtgaactacatagctatgtagtttttacttttttcttcttaagctttttttctacctggaataaccttcagccttatatttctgatcccccaaatctccacatcactctcccattcaagatctacctcaaatgcgtcctctcttccacaaagtctgccctagttcttccctcagctggacataagaagccttcctcttacactctttctgcttcagccagtagtactttctatgtcctgtgattattctaaagtatgactttcaaattttttattatgattatatacatatctctcttttctaataaactctgaactttgaaatagtaagatatgtctgattcatctttgataacctaaaataatcttacatataattaatactttatgaataaatacttgtgggataaagtcaggttttcagtttttgtcagggtacaatgaaccccacctttatgttctgagaattttaaagatgatttattccatgaacaactttcatagtttctctggaaattatctggagatgacattgttcattgttcattgattaaatatattacgaacatagttaatcagtcaggggaatgatctctttctctcagtgagaagtgttttcaggtttgcctggcaatcatggtgttggatggattaacttatcctacacctccagccatatcaactcctatctgatgttccactccaatttgacccaattcaagttccgttttttccacaaagcctcagtcttcagggatcactcagtttcaggttcctttagtgcccattctctatgccagtcatcactgtagatgtggtatacctgtcactgttgttacttacctcatgtggattcgttttttcctcatgtatgttacaagctacttaagaatcaggaccatgggacactctcatatactcctgtaaacactaccacttagccgtgggcagcacagagtgggagtttagaaaatgtttgtgataattcccgcatggaagtactgcgtgaggccagtccctacaaccattttcacaagttaagtctcctcaactctttgcaccacaagttaatgttaaagtgagtatactggctggcagctaatgtaaagttatgagtcacctttgagcagcataaatgctggtgttcttcattgtcattatatgtcatctgttggccataatgctggtataggaaatccattcaagaagagagaacatgaagaatgatgtcagaaagatattcctggaacccatgcatcctcatatagcaataataaatctagagagtcattgtgtggcttccagagtcactttgtatcttccaaagctgtcaagtgtcttattgtgtcctttccgtagtatacgaggcctgtctcaattgggccctagtgtgcttttctagtctcattccaagacactcacctaatcaagattattgacatgaattatgtaccaataatcttggtacataccaaccacagagtatgtaccaacaacatagtaaaaagctgtgagagcagattctatttatattctgttatgtactaaacaccagggatacgaagatgaacaaacaggctcttcttagacagccttcagtttgtgaactattctccaaacatgcttaggccttccaagcctttgcttctatggttccttgtttaaaattccttgtcacctgtgtctgctgattgaactcctaccccttgtatcatctgtgacagctctcccccaactctcctccaaagcagtgtaaatttttcctcatctttctctttacttgtgtgtgtttatctgctatagccattatctcattgtattatacaatactatatgcatatgtacaacatgcttttgagtgcaggcaatagaataaccatcaaaaattgggctatatagtaagtcactaaactaattcaaataacagcaggtctggaaggaggcattttcaggtgtgacagccccatgacaccatagggattcaggctctttccttttctgccccactatctttagtaaattaacttttagtccttaggtcttttgtttcatgttgccagataactactgcaactcaagaactcatttcctcacacagatgtattctgaggacagggatgtatgattgtcttcatatatctctctcctttttttttttttttttttgagacaaagtcttggtgtcacccaggccagtgtgcagtgatgtagtctctgctcactgcaacccctgcctcccaagttcaagtgattctcctgcctcagcctcctgagtagctgggactacaggcacacatcaccacagctggctaatttttgtatttttagtagagacggggttttgccatgttgctgaggctggtctcaaactcctgacctcaggtgatccacccacactggcctcccaaagtgctgggattacaggcacaagccaccatgcccagccttatctctctccttttgtcaggtatattagtccattttcacattgctgttaaagacacaccagagactgggtaatttataaagaaaaaggtttaatggactcacagttccacatggctgaggaggcctcacaatcatggtggaaggtgaaagtcataccttacatggcagcaggcaaaaagaaaaatgagagccaagagaaaggagcaaccccttattaaaccatcacatctcatgagacttattcactaccacgagaacagtatgagtgaaactgcccctgtgattcaattatctcccatcgagtacttcccacaacacaggagaattatgggagctacaattcaagatgagatttgggtggggacacagagccaaaccatatcattctgcccctggcccctcccaaatctcatgtcctcacatttcaaaaccagtcatgccttcccaacagtcctccaaagtcttaactcatttcagcattaattcaaatgtccacagtccaaagtctcatttgagacaaggcaagtcctttctgcctatgagcctgtaaaatcaaaagcaagttagttactttctagatacaatggacgtacaggaattggataaatacacccattccaaatgggagaaaattggccaaaatgaaggtgctaaaggccccatgcaagtccagaatccagtggggcagtcaaatcttaaagctccaaaatgatctccttggacttcatgtcccaacatccaggtcaaactgatacaagaggtgggttcccatcgtcttgagcagctctgcccctgtggctttgcagggtacagcctctctcatgactgcttccatgggctagcattgagtggctgtggcttttccaggtgcacaatgcatgctctcagtggatctaccattatggggcctggagtatggtggccctcttctcacacctccactaggcagtgccctattgggaactctgtgtggggactctgaccccacatttcccttctgcactgccctagcagagaggttctccatgagggccccacccctgcagcaaacgtctgcctggacatccaagggtttccatccatcctttaaaatctaggtgatggttcccaaacctcagttcttgacttctgtgcacccataggctcaacaccacgtggaagctgccaaggcttggggcttgccctctctgaagccatggcccaagctgtaccttggacccttttagccatggctagagcggctaggacacaggagaccaagcctctaccatttttctacgaaaccattttttcttcctgggcctcagggcctgtgatgggaggggctgccgcaaaggtctctgacataccctggagacattttccttctcaaagagattctataaatgaaaatgtgaataattattctaatttgttggtatgagcataactcttttgtggtgagttggcattagataagacaaatacgtctgaactggaatttgtgatattttgcaaattatctgatgaagataatacccctttagtataactaggatctgttctcaccgcttttacagcaagatggtaagttgatgttttattttggagacgtcagtcatcttgttagctgcattacttagtatcggagtcaaatttcagttaatctataaacaagtctcatgactaacattacctgcttcaaaatggattggaaagccgtatcccactatttcatttgctatgtaaggctattttgttgcagatgaaataattgaatgccttaacagcaagaactttttatcttgttcaaaaaacttttttggcaaatatcctccagaaatttaattttctttgttgttgagtgggaaaaaaaatcaccctgtttttcctctgctctcaccccacaacagtcaacacagaagacttctgtgaccaactgtgtgggggattttcccttacaccagcaagcagtcaattctgtagcagatgcctgggtatcctccgattcaattccaatactatctgcctggatacagtatcagatccaacaggttgaacactcagtcccacaagactacctacagcttgtcagtcacaagacccagtttgttttacctgtgcttctaaccaaccagctataaatcagggttcccacaaccccctcctggggcttgtttaatttgccagagcagctcacagaactcaaggaaatacttagggttaccattttattaggatagagatgaagagctgcgcagggtaaggtatgggggaagaggtgcagagcttccacactcagtcctgagtgctgtgccctctgggaatgtccaccttctcagctatccagatgctctcagaatccagtactttgggtttttatggaggcttcattacataggtattgaatcaatcatacctatgtaattaatggttatgatggttaagccattggtgatcagcttaaccatcagcccctgttccctccctgaaagttggggggtggagctgacagtcccaaccctctgaccctgccttggtctttcaggtgaccagccccatcctgaagctcctagggggctgccagccaccagccaattcattagcatagaaaagcacatcactttatttcaaggattttaggggttgtatgccaggaagctgggacaaagaccaaatatctatttcacaatatcacagtcatatttgtgtaagtttatattcatacagcaagcatttattgagagcctatcgggcatgagtcaggacttagtgcaataaaaatacatggttgctctctggattagagaagtgtgatctagttaaaaagttaaatagacctaaacaatcaaagtaatttcaaatagtacagggggccctacctgttcaaagagaacctctagtttcattatatttcttttatggatgaaattaggatctttggcctatgtgcagcattattggatgcttggtttggtatgttgtatgagatgacataaaatcttaaatcaaggtgcataccattttataataaagctgccaaatgagaaatcaacataataatgcaagaaaagagtatgcaagggaagtcttgtaaagctgtacctttgagtacaggtaggacagtgttgggcaagaagccgggttctgaggaaatctggagccagaaatgtgacaatgtgtttggcagctagtgagaagaccggactgaccaggcagacttacattggacaacagagagcagtaaggcacatagggggttaagaacaagtcatgaagggcctttcatttagggcaataatcaataaatgttaaactgacctgaacagactgagatgttaggctttatactctgacaggtgccaaatacctaaccattccacagtgaagaaggccaggagccaggctggagcaggttgatgtaatgattattctagacagaaagactattatatttgcactcaacaggtgggggaccatttcatgtgtgtggacataaatctgggtgaagcccactcttgattatcatggtcaaatttgccaacatgaaggtatcaagtatgtgttgaatgaagacattccagtttattagagactggcagttctcaaagtgtggtccatggaccctaagatagccccaagactcggagggggggtccatcttttcacttgttgacatttacgattcaaaagccatgttggggagcctgctggcagattaccatgaacaggcagtggcccttaattgtagtagtgagacaggatagctcccttgacccccttcgcgggcaggaactggagtggctcgtttcagcccgctgctggccactgctcataggagagagtgtacaagcgagcaagcaagtataggaacaggagcgaacaaacgctgcaaccagccagtcactcctctctggtgggagcaggctctgtgagggccctgcagcagtgtccaagtgtgttacaaccaatgcacttcaagctctcccatccggggacagccaagtgccagccagctgagtggagggtcagagtggcagcccctgccctcttggcacgtgggttcttgtctggtgtccaggaagaatcaggtcatatgaactgtttgaaaggtgatgcatgtggaagactttattgagcggtgggcggctctcagcagaaagggaggctggaaaggggatgggaaggtgatctttccctgaagcctggccatctccagccaggcccctctccaagcttcactgtctgaagttagctgcatctgtccataggctccgatgctcagttgcttctctgcttgccgctcagctgcttgtgttgctctgccagctaagtcttttatgggcccaggatgggggtaaggggcaagccagaaaggcaacgtttgggtggaaaaacggggtcagctgtttccacgtaggaccacagatctaggctgagcttaagggtggggtttagatgggagcccagctcttctatatcactagtagttaatggattctttaccaccacattcttgcaggaaaaagaaactgctttctgttacgaatatctttgaggaagcagcaaaattaattttagcaaatctcaaccctttactgcccatcttttttatgttctgtatggtgaaatgggaagtttgcataaagcacttgtataattgtttgagttgcaaattgaactagcctcttttttatagaacaccatttgtacttgaaagaatgactgatagacagactggttattcagacttgggtatttggcacttccccaaaaaaatgaacctagtgagcatgtcacttcaaagaaaacaatggatagtgcttgttgccagtgataaaattcaagctttcaagtgaaagttaaaatactgaaaagcttgtatctaccaccatagcattgacaccttcccaatacgtatttttctgataatgacaaaagtgatatttgtaacgtggtataattaaatgtgtccgtgttttgaagatctgtataactctattaataagtattttctaaatgaccagtgaatgatattaaaaatcacacatggggaaaagatttacccaaagttcaagatacaccaatgaattttaacaatataaaaattttactgaaaggtttcagatttttaatgaaattaaccttgagttttggtatagtgtcaaagaaaatccataattatctccaaatctgaaaatatctattaaaatatttttcccttttctaactacatatctgtatgagaccaattttcttcataagcttcaaccaaaacaatgtgtcacaacagattgaatgtagaaacagaagaattcagctgacttttattaagccaaatattaaagacatttgtaaaaatgtaaaacatagccacgcttctcactaactttttggttttttgctttggaaaatatagttacttttgttttaaaaagttccttatgttaacatgtaatgggcttttgttattttaattaggtgataaagactttaaattttcagtagatataacccacacaaacaaaaactccttgagattctcaataatttttgaagtataaaggggttctaagaccaaaaagcttcagaactgctgtcttagacccatatgaaaacagttgccttatcattaaattcacttctagcaggatatgcttccatttggtctttctctgtgtgaaaatgttactttctctaatgcataaccaaagaaagcatgtcagaatagaagagagtaaagatgatgtgattatagggaattaactctaatttactaaaaaagctgaatctttcacatactttagcactttattattaataataaataattacatcaaatctcacaactagttgtaatgtctcagtgtcatttgtggtacgtgcttgaaatcttcttccccagacactggagagccatttggttgccttctaatcaaatcagcctaagtggcccagctggaggccagggtggagggacatgaggagcctaagctagccactggaaaacacaggcagcagtgggtgcctgccaagaaaggctttctatggttaattttttttcaccagcaccattcttctgtgatctttgttgccagtgatacgacatataacaggtattatttcatatgaggtcacatataacaagtattatttcatatgagatcttcaggtagtctttatagaaaatatagtaatacaaataaaacttagtacatacagagatttgaaattgaggtcaaggctacaagatgtgatggacctatctattagtacttactggagatcctataaagactagtagaattgtgaattttaaatacgaaagagactggtaggagtcccagatccaaatctcccttctcctagatcccagtctccaaatctttcattatccccaagatgatcctcagaaaggtacagaatctccccaaatggaaagagtaagtggcaaagtagggcctggatgccagggctatggtgctgagtccagtgctcagactgctatctggaaaggcttctatcctgctctagcctttgtaggaggaattaaagggaatttactcctgggctgtactctcatggtgaactgagggtattagcgaaattttccattgcacatctgcaagctttggtgaaggtaattgctatggtctcgcttggccctttcccacagagccagcaggtcagcagaccccagggagatggagttcctgtgtttctgtctgtagcacatggcattcacctgctccccccaatgctgccacttcgcatcatttcagatagatgggtttcttgaacaatgagtcacccctataagtgatgctgaatttccacaagcagcttctatcagatttagtttgatatgtgtttatttgaagagatacttccattattcttgaaataaaagcaggctcaggacagccaatataaagttgtccttatgtggctcactcagaaagcaaagcactattgaaaaaagagtttagctggataatatagtattactccttccaggaagaaagcagacccatggttaaaaactttcatctccctctctccccagaaaaggttttggatttgaatctaaatgctgttgtttttttcagatttgaacatcatttttaaacataggcagaaaatttgactctatgtatatttgtggtggatcctctgaccagctggcttttctgcagatagtgagttaagacaattcagggatagctcatagttgccttaggttcttgttgagtattggaaaactgcatttacagtaacattttctatctccaggcacaaaccttgaatgatgttgaggattttcatacttaagcaaaaatcccgaaatgttttgttgttttgactgcttgatggcagagttggcatgatcaggtggatatgagggcttgtggccacatggtgtgcccacctgtgatgaccttagagtgtcttgtgaagctcaggaacaaggtgtacaaagagctatcctgggatgggcagatcctttttgaccttagaatcagaacttttaattaagccttccactctagcttctcagtgggtcagagccatcaggaccttccagtggctttgaagatctcctccttgtttccagttttctcactgacttatcaggcctaatcatctggttatggaagagttggtgcagctgtttagcatgcactgctctttgttctgtttgctccgtgaggtatattctggagaagccagcccagtagatagatccattccacacttgcttaataaaagatttcactacttcctcgtggcctcctgtggacaactgtcaggctgttctgcttccctgtgcaccatcctcccaagccttctctgcaccttggagtatacagatgagcaggggagaatgaatcagattatctgcagattatcagctatagctgtgtctccaggaattcgcccaaagagatttagaaagatgcagagattactgataatatttctcctgccgaaatgggaactagaggctgttccttgattgcacttgaaacttgctctcctggattgtaacttttttgcctcatttgttacagtgtatgggtgtgggaacgattcctccctatcagcttttttcacttctttgctattcctacctaggtgccctctactgttctttagtaacttacctccaaaattactttttgcttggagaatattaatagagggtttcttatttcataaacattctctgaacaattctagtatagccttctactatataaagatagattccatatgtagctgagtaaatagaaaactgctaatttaatcatgtgcctgtgaggtaggggggaatcttccttgtatttttaagtatactgacatcaaagatagctatctgcaaagttaagagttgattttgtttttacttaccctttcatatcaaaaatcttaacttttttcagttgagcctttcaataaatatcatttcaatgaaaataatgcaacttggtttagatctaatgccttaaaatacacagaatacacttttggttcaaaagaaaaagtattatcaaagttcatttgaatgtttcatactatcaatctaaatgaagataaggaacttttctgctgttaaccagtataaacctaaaacctaaaagtaagaagtaagttatagagaattatggatagttagtagatctagggtggactcattctgtctactctggaagaagaaagttttccctacaaaagtaccttcttggttattgtaatcataatacataggcattccttgttttagtgtacttcatttgattgcactttgtagataatgccttttttacaaattgaagttttgtggccaccctgcttcacacaaggctattggcatcatttttccaacaatatgtgctcactttgtgtctctgagtcacattttggtaattctcacaatattttgaagtttttcgttattattatatctgttaaggtgatccacagatcacatgcatgatctttgatgttcctgttgtaactgttgggcaccaactgcacacattcaagatggcaaacttaataaatgtgtgtgttccgactgctctacaaccagccattttccctctatccctctccttagacctccccattccctgaaatgcaacagtattgaagttaggccaattaataatcctacaatggcctttaattgttcaactttaaaggaagagtctcacatctctcacatcaaaagctagaaatgatgacgcttcattagaaaggcatgtcaaaagccaaaataggctgaaaactaggcacctgtgcctaacagccaagttgtgaatgcaaaggaaagttctggaaggagattaaaagtgctacttcagtgaacacacaaacaataagaaagtgaaacagccttatctctgacatggagaaagttgtagtggtctggatcaaagatcaaaccagccataatattcccttaagcctaggcaaggctctaatgcacttcaattctgtgaaagctgagagaggtgagaaagctgtagaagaaaaaatttgaagctaacagaagttcatgacatttaagctaagaagctgtctccatagcagcagcaagtgctgatgtagaagctgcagcaagttatccagaagacctagctaagatcactgatgaaggtggctacactaaacaatagattttcaatgaagacaaaacagccttctgttggaagatgttacctaggattttcatagctagaggggagaagtcaatgcctggcttcaaaggacaggctgacgctcttgttagggactagtgcagctggggactttaagtagaagccagtgataatttaccatttggaaaatcctagggcccttaaggattatgccaaatctattccacttgtgctccataaatgaaccaacaaagcctggatgacagcccatctgtttatggcatggcttactgaatatttcatgcccactattgagacatgctactcagaaaagaagattcctttcaaaatattgctgctaattgacagtgcatctagtcacccaagagagagatggaaatgtacaaggaaatgaatgttgttttcatgtctactaacacggcatttattctgcagcccgtagatcaaggagtaattttggctttcaagtcttatttaagaaatacagagccgggcacagtggcacatgcctgtagttctagctactcaggaggctgacctgggagaatcacttgaaaccaggagttcaaggccagcctggtccacttggtgagactccatctctaaaaattaaatttgaaaagaaaataagtttcataagactgtaactggcatcaataatgatttctctggtggacttgggcaaagtcagttgttaaccttctggaaaggagtcaccattttagatatcattgaaaacatctttgattcatgggagcatttcaaaatatctacattaacagaagtttggaagaagttgattccagccctcatggatgactttgagagattcaagactttagtgggggaactaactgtagatgtggtggaagcagcaagagaactagaattagaaatggagcctgaagatgggactgaactgctgcaatctcatgataaaactttaacaggtaaggaattgcttcttatggattagcaaagagcgatttcttaagatggactctatcctagtgaagatgctgtgaacattgttgaaatagcaacaaagaatttagaatgttacataaacttagttgataaagcagtggcataatgtatgcacacctaatagactacaatatagtgtaagcataacttttatatgtactgacaaaccaaaaaatttgtggtggtggtccaggaccaaatctgcagtatatcagaggtatgcttgtattatcttttaaattcctattccaaatcattttactgaatcttttattacttgaatcttcattactattgctgtttcatcgtgttgccacagtgtcatgacttcacagctttgatataattggtaatgaacaagtttgagttaagttcacgtaatctagaatcttttcatcctagccttgtatgttgttttataataagttataattgtcactacaatagcaactgcaatgcagcattatttatcttgtaccatttattgtgaaagatttactattttagtgaaaccaacttttctaacgagcaccaaaatgtttataaagtagatattgtttttcaaaagacaagaatattcgaaaagtataccaatggtgctgctgcttaaaacagcggtttttcaactctttctggccatatacaccttttctggccatatacacctttaagaacatgattaaagccatgggctctttttttttgaaaaacgtgttcatgctcaaatgtgcaaatacagcttcaggagattcatagatatccctttctgaagtccctgaaacccatctacagaacctttggagggtcggtggacccaggttaagacccccactctccctgccagtggaaaacaattaatgcccccctcaaagatgtctgttaactcatttctggaacctatgaatacattacattacccagcaaacaggaaaaggaattaaggttgtagatgcaattaaggttgaatcagctgaccttgagatgggtcaattggatgtatgcagttaaggatgttaattaacccactttgctcgtggattatctggataggcccaatctaatcacattagttattaaaagcagagcgcctttcctggctgtggtgagagggtgatgtgactgtgcagaacagttagagaagaagggttgctagctttggaaggggaccacaagacaaggattgtgggcagcctccaggagctggaaaagcaaagaaattcattatcccagagccttcaaaaaggaatgcagccctgccaacatcttgactttagcttagtgagacccatgtcaagcttctgacctacagaagtataagataatgaatttatgttgttttaagtcactcgttttgtgatactctgttatggcagcaataggaaactaatccagtacactgcccccaacccatacatagtttatacatgtaacctttagagctttcattcagaataagcctaaatggcacattgattcctaaaatttatttttaatataactattttgtttcacagccttgtttcagtaaagtattaaagttccctgctaaaatggaaatatgaaactagatagatttttaaaaataaaagatagctattgagcccatgttaaataagaatgattttcctggccgggcgtggtggctcactcctgtaatcccagcactttgggaggtcgaggcaggcagatcacgaagtcaggagatctagaccatcctggctaacagggtgaaaccccctctctactaaaaatacaaaaaaattagccaggcgtggtggtgggcgcctgtagtcccagctactcaggaggctgaggcaggagaatggcgtgaacccaggaggcggagcttgcagtgagccgagatcacgccgctgcactccagcctgggcgagagagtgagactctgtctcaaaaaaaaaaaaatttccttttattattgcctgaaagaatcagatttttaaatgtggaatgtttggcaaaaattaaagatccacgtgtctaatagctatggttgcaaaagctgaattttcctaaagaagttataaaaccaatttaagaaaaatgtatctgtatacatgtgagctttgcagtgctgccagggtcattgcaagacccagagtaaacacgtaaataattgacaattgccattgcttggcatgatttctctatggcttcagaaattgcaaaatatgaggatggtattttctttattggcccagttccttctctttctgtttactccctttaccttcatgtaataagcaataccatctcatctcatagtaacgaatgattattttcttgggggtataatctaggatgatgagtctttgtattaggaacttctggtgttcattttgttttgtgatagtaaataaatgcatcaaatctttttcaaactttaaagattaacatttttctttctattaatgttttaagatacaattttttttttttttgagacagtctcactccattgccaggctggagtgcagtgacgtgatctcagctcactgcaacctccgactccctggttcaagtgattctcttgtctcagcctcccgagtagctgggattacaggcacataccaccacacccagccaatttttttatttttagtagagatgaggtttcaccatgttggccaggatggtctcgatctcctgacctcgtgatccgcccacctcggcctcccaaagtgctgggattacaggtgtgagccaccgcgcctggccaagatacaattttttaaaatatatttttaaggaaagtacttttaacattactgatataaagccctggttcaacctgaccacctggcattttgtgtttgtccatctgaaccacagtagcttttgaacatgtcagttttccttagaaatcgtttgttactaaagaacatactcttgcttttgtcagtttcaataaaatgaaccagaatataagttatagaggtaaatgtcttatacaaaaaagaaaaaagataaacatcatatttttaaaaatggcttgtcacttttaaatcccttaagggtaggggaatatttgtatatataaatatctttgcatctcaaatgcataacatgttggcaggaacgtaataggtgcttagtaaatatttgtggaattaaaagtcattccttgcccacattcattgaatgtatcaccgcttcaatcccattgaacttctattaaaaaaaagaccagacacagtggctcactccataatcccaacactttgggaggttgaggcaggaggattgcttttgagcccagggtcttgcagcattacctatgccaatctgggcgacatagcaagaccccatgtctataaaataatagaaaaattagctcggcctgtgggctcgtgctttgtatgtctgaaaagttcttacgtgatagtgtgtccggaattggtgggttcttggtctcactgacttcaagaatgaagccgtggaccctcgcggtgagtgttacagctcttaaggtggtgtgtctggagtctgtcccttctgatgttcagatgtgttcggagtttcttccttctggtgggttcatggtctcgctggctcaggagtgaagctgcagaccttcgcggtgagtgttacagctcttaaggcagcgcgtctggagttgttcattcctcccggtgggctcgtggtctcgctgggctcaggagtgaagctgcagatctttgcggtgagtgttacagctcataaaagcagcgtggacccaaagagtgagcagtagcaagatttattgcaaagagcgaaagaacaaatcttccacagtgtggaaggggacccgagcgggttgccaatgctggctcgggcagcctgcttttattctcttatctggccccacccacatcctgctgattggtggagccgagtggcctgttttgtcagggcgctgattggtgcatttacaatccctgagctagatacaaaggttctccacgtccccatcagattagttagatacagagtttcctcacacaggttctccaaggccccaccagagcagctagctacagggtgtcgattggtgcattcacaaaccttgagctaaacacagggtgctgattggtgtatttacaaaccttgagctagatacagagtgccaattggtgtatttacaatccctgagctagatataaagactctccacgtccccaccagactcaggagcccagctggcttcacccagtggatcccgcaccggggctgcaggtggagctgcctgccagtcctgcgccgtgtgctcgcattcctcagcccttgggtggttgatgggactgggcgccgtggagcagggggtggcgctcgtcggggaggcttgggccgcacaggagcccatggagtgggtgggaggctcaggcatggcgggctgcaggtcctgagccctgccccgtgggaaggcagccaaggcccggcgagaaatcgagcgtagcaccagtgggccagcactgctgggggactcagtacaccctccgcagccactggcccgggtgctaagtcccccattgccggggaccagcagggctggctggctgctccgagtgcggggcgcaccaagcccacgcccacctggaactccagctggcccacaagcgccacacacagccccggttcccgcgcgtgcctctccctccacacctccctgcaagctgagggagtgggctccagccttggccagcccagaaaggggctcccacagtgcagtgggggactgaagggctcctcaaatgccaccaaagtgggagcccaggcaggggaggtgccgagagcaagcgggggctctgaagactgccagcacgctgtcacctctcaatagtttaactgggtatagaattctaggttgccagggttttttgttttgttttgtttttttctctgcgtgttgaagatatcccattttcttttggtggataggattgtgatgttaatgagaagacggatgttagtttggctttttttttttttcctgagacaagatctggccctgtcacccaggctggaatgcagtggcacgatcttggctcattgcaacttctgcctcccgggctcaagccatcctcccacctcagcctccagagtagctgggactacaggggcacgccaccgcaccaagctagtttttgtatttttttttgtagagaaaaggttttaccacattgccaggcaaatgtggttggtcttgaaatcctgggctaaaagtaatctgcctacctcagcctcccaaagtgctgggattacaagtgtgagccactgtgcctggcctaatttggcatttctttgtaggatgtcttatcctctttctctggtagtttttaaggtttgccctttatctgtgatataacaaaatgcaggtttattttcatttttcctactagggattcttcctcctttttcagtttgaggattcctttcttttgcaggtctctggcattatctcttccattttctctattctgtccttttagcattttagaaactttgatatgtcttctgtctcttaacttccctattttttttaatctctgcacttaattctgagtaattttatccttccagtttatcaactgcagtgagctgtgatcatgccactgcgctccagcctgggtgacaaagtgagactctgctatgtgtttattcattcataaataaatatctttttcagattgctttattataggtaattcctcggatttcagttcttatatttgttacatgtgctcaatttcatgatggtaggttttatatgctcttcataatttttgtctgaactccttctgttttcattggaatcaaaagcattctctggcttatggcagtcttcctatggtatgttttttattcacccctcattgagatctatggttttcactagttctggacaaattatttatgttaattttcagcttagagttcccataccaccacgtggtacaaatcgcattccacacatggcactggctgggcattcgtgtttgtcaccagtgattctttctatctagagtaagaaagtggcctacttctagcctgtgtgccaggtttggctttcctggctttaatttgcaaatttgactcctcattcctgttttgtgtttctttgttgtttaatgcagggagttaaaccatttccatctcccatttccacatgggtgctatagactatagcacccacatggtgctatattccacatgggtgctgtaacttaaggtcctaccctactagggctgctgagcttcagctcccactcaccactgtgggacttccttgtttggggcacctagacattctgctttcttacttttgagctccagtgtaattttgttgttgttattgttaaattgtatttagtatttctctttttggaataggatgaggactttctacctattcatactgtatcatcttgtcaggaaaactgggactgtataaagtttatttttcttgcctcactgtcagtaaaatttatgttaggcaggcaattcatggtctctgtaaaaggagtatgattccatctataattcagccaactgtagttagcatctcaaaatcactaaatattcttgcaacccagcagaggttgaaatgtaagatttatgatttatttatttaattattacataaagattggtattttttacatgtctccattaatgaaattagacaactgaaagactgcttaataattttgcaattactaaattagaaaattttagatatcccatgtttatgccatagtgtatataatcattaatttttatccttctttggtatagtaggtatcaacgtatgtatcagtatgcccaagtcttgacaatggaaataacgtattattgccaatacttgtataacttaaagaaaggtataaaaataattttttccctgtgtcatcttcttaaagacctaggttaatatcttctgacattgatttcagttggagaatatgatttacttcattataaagagtattgagaaaaagtaagacattctcattatttgaccaacaatgactattttttcagacatagcttttgtttcctttctttttttcagacatataaagaaaaagtggatgcagatacattgccacacacaaagaaaggccagcaaccgagtgaaggcagcatttcacttcctctttacatttcaaatcctgtaaaccagaagaagaaaaaagtctaccatacaaaccagaccaccttcataattggagaaacaccaaaaggaatccgcag

SEQ ID NO: 1659 - DNA, 472 bp, Homo sapiens
  full length sequence of bloodCirc_22389
ctttctgaaacaaaggtcttcactgcctcatctgctccagcagagaatcacatcttacctgggcaaagcattgatctggtagccttgctccagaagcctgttcctcacagtcaagcctcagaagccaactcctttgaaacttcccaacagcagggctttggccaagcccttgtcttcacaaattcgcaacacaacaatcagatggcaccagggactggcagctccactgccgtcaactcctgttctcctcagagcctgtcatccgtccttggctcaggatttggagagcttgcaccaccaaaaatggcaaacatcaccagctcccagattttggaccagttgaaagctccgagtttgggccagtttaccaccaccccaagtacacagcagaatagtacaagtcaccctacaactactacttcttgggacctcaagcccccaacatcccagtcctcagtcctcagtcatcttg

SEQ ID NO: 1660 - DNA, 258 bp, Homo sapiens
  full length sequence of bloodCirc_16786
gtttatctggcaagactgaggcaaataagactacagaatttcaatgagcgccaacagattaaagccaaacttcgtggtgaaaagaaagaagctaatcattctgaaggacaagaaggaagtgaagaggctgacatgaggcgcaaaaaaatcgaatcactgaaggcccatgcaaatgcacgtgctgctgtactaaaagaacaactagaacgaaagagaaaggaggcttatgagagagaaaaaaaagtgtgggaagagcat

SEQ ID NO: 1661 - DNA, 128 bp, Homo sapiens
  full length sequence of bloodCirc_17237
gcaagaattagagggttgaaaccaggcttatttattttcatcttctttctgccatcttttaaccaaccttctcagaataaaatgtgatttttgagacagaatgaaacacatatccaaattttaataca

SEQ ID NO: 1662 - DNA, 280 bp, Homo sapiens
  full length sequence of bloodCirc_12672
gattctagatatttcttttaatctgctgagaaacatcgaaggggttgacaagttgacacgactgaaaaaactcttcttggtcaacaataaaatcagtaaaattgagaacttaagcaacttacatcaactacagatgctagagctgggatctaaccgcatccgggcaatcgaaaatatcgacaccttaaccaacctggagagtttgtttttggggaaaaacaaaattactaaacttcagaacctggatgcgctcaccaacctgacagtcctcagtatgcag

SEQ ID NO: 1663 - DNA, 1192 bp, Homo sapiens
  full length sequence of bloodCirc_06705
gcatcagagaccccaactctacaaggcctttcctttactgtcagacctggcgaattgttagctgtggtcggccccgtgggagcagggaagtcatcactgttaagtgccgtgctcggggaattggccccaagtcacgggctggtcagcgtgcatggaagaattgcctatgtgtctcagcagccctgggtgttctcgggaactctgaggagtaatattttatttgggaagaaatacgaaaaggaacgatatgaaaaagtcataaaggcttgtgctctgaaaaaggatttacagctgttggaggatggtgatctgactgtgataggagatcggggaaccacgctgagtggagggcagaaagcacgggtaaaccttgcaagagcagtgtatcaagatgctgacatctatctcctggacgatcctctcagtgcagtagatgcggaagttagcagacacttgttcgaactgtgtatttgtcaaattttgcatgagaagatcacaattttagtgactcatcagttgcagtacctcaaagctgcaagtcagattctgatattgaaagatggtaaaatggtgcagaaggggacttacactgagttcctaaaatctggtatagattttggctcccttttaaagaaggataatgaggaaagtgaacaacctccagttccaggaactcccacactaaggaatcgtaccttctcagagtcttcggtttggtctcaacaatcttctagaccctccttgaaagatggtgctctggagagccaagatacagagaatgtcccagttacactatcagaggagaaccgttctgaaggaaaagttggttttcaggcctataagaattacttcagagctggtgctcactggattgtcttcattttccttattctcctaaacactgcagctcaggttgcctatgtgcttcaagattggtggctttcatactgggcaaacaaacaaagtatgctaaatgtcactgtaaatggaggaggaaatgtaaccgagaagctagatcttaactggtacttaggaatttattcaggtttaactgtagctaccgttctttttggcatagcaagatctctattggtattctacgtccttgttaactcttcacaaactttgcacaacaaaatgtttgagtcaattctgaaagctccggtattattctttgatagaaatccaatag

SEQ ID NO: 1664 - DNA, 241 bp, Homo sapiens
  full length sequence of bloodCirc_18425
gtattttgatcacaactatagcctccaagggagaattgcagaattggcctgacctcttaccaaaactctgtagcctgttggattctgaagattataatacctgtgagggagcatttggtgcccttcagaagatttgtgaagattctgctgagattttagacagtgatgttttagatcgtcctctcaacatcatgattcccaaatttttacagttcttcaagcatagtagtccaaaaataag

SEQ ID NO: 1665 - DNA, 427 bp, Homo sapiens
  full length sequence of bloodCirc_17203
gaatatgaagacaaggctggaagacctagcaagccaccctctccaaagcagaatgtgaggaagaatcttgactttgaaccactttccaccaccgcactcatcctcgaggacagaccagcaaatctcccagcaaaaccagctgaagaagctcagaagcacagacagcagtatgaagaaatggtggttcaggccaaaaagcgagagctgaaagaagcccagcgaaggaagaagcagctggaagaaagatgcagagtcgaggaaagcattggaaacgctgtgctcacctggaataatgagatcttacctaactgggaaacaatgtggtgctctagaaaagttcgagatttatggtggcagggaatccctccaagtgtgagaggcaaagtctggagcttagccattggcaacgagttaaatatcacccacg

SEQ ID NO: 1666 - DNA, 278 bp, Homo sapiens
  full length sequence of bloodCirc_21660
ttgctgatatgtgttcaagatgagtgggatgggagaaaatacctctgacccctccagggcagagacaagaaagcgcaaggaatgtcctgaccaacttggacccagccccaaaaggaacactgaaaaacgtaatcgtgaacaggaaaataaatatatagaagaacttgcagagttgatttttgcaaattttaatgatatagacaactttaacttcaaacctgacaaatgtgcaatcttaaaagaaactgtgaagcaaattcgtcagatcaaagaacaag

SEQ ID NO: 1667 - DNA, 444 bp, Homo sapiens
  full length sequence of bloodCirc_00651
aatacagagtcaaaaaagttaagtccaccggtggtggagacactccctacagttgatttgcatgaagagtcttccaatgcagttgtggacagtgaaactgttgaaaatatttccagctcatctacctcagaaatcactccaatctcaaagcttgatgaaatagaaaaatctggtactattccgatagccaaaccaagtgaaactgagcagtctgaaactgattgtgatgttggtgaggcccttgatgctagtgctccaattgaacaaccttcctttgtcagtccacctgacagccttgttggccagcatatagaaaatgtatcatcttcacatggtaaaggaaagataacaaaatcagaatttgaatcaaaagtttcagcaagtgaacagggcggtggtgatccaaaatctgcattgaatgcttcagataatttaaaaaatgag

SEQ ID NO: 1668 - DNA, 251 bp, Homo sapiens
  full length sequence of bloodCirc_17135
gagattacctggggcaattgatgttatcggtcagactataactatcagccgagtagaaggcaggcgacgggcaaatgagaacagcaacatacaggtcctttctgaaagatctgctactgaagtagacaacaattttagcaaaccacctccgtttttccctccaggagctcctcccactcaccttccacctcctccatttcttccacctcctccgactgtcagcactgctccacctctgattccaccaccgg

SEQ ID NO: 1669 - DNA, 728 bp, Homo sapiens
  full length sequence of bloodCirc_06702
gtgtatttgtcaaattttgcatgagaagatcacaattttagtgactcatcagttgcagtacctcaaagctgcaagtcagattctgatattgaaagatggtaaaatggtgcagaaggggacttacactgagttcctaaaatctggtatagattttggctcccttttaaagaaggataatgaggaaagtgaacaacctccagttccaggaactcccacactaaggaatcgtaccttctcagagtcttcggtttggtctcaacaatcttctagaccctccttgaaagatggtgctctggagagccaagatacagagaatgtcccagttacactatcagaggagaaccgttctgaaggaaaagttggttttcaggcctataagaattacttcagagctggtgctcactggattgtcttcattttccttattctcctaaacactgcagctcaggttgcctatgtgcttcaagattggtggctttcatactgggcaaacaaacaaagtatgctaaatgtcactgtaaatggaggaggaaatgtaaccgagaagctagatcttaactggtacttaggaatttattcaggtttaactgtagctaccgttctttttggcatagcaagatctctattggtattctacgtccttgttaactcttcacaaactttgcacaacaaaatgtttgagtcaattctgaaagctccggtattattctttgatagaaatccaatag

SEQ ID NO: 1670 - DNA, 17877 bp, Homo sapiens
  full length sequence of bloodCirc_20191
tacaagaagaattcctatggtgtccacccctactacatggggctggaggaggacggcagtgcccatggagtgctcctgctgaacagcaatgccatggatgtgacgttccagcccctgcctgccttgacataccgcaccacagggggagttctggacttttatgtgttcttggggccgactccagagcttgtcacccagcagtacactgagttgattggccggcctgtgatggtaccttactggtctttggggttccagctgtgtcgctatggctaccagaatgactctgagatcgccagcttgtatgatgagatggtggctgcccagatcccttatgatgtgcagtactcagacatcgactacatggagcggcagctggacttcaccctcagccccaagtttgctgggtttccagctctgatcaatcgcatgaaggctgatgggatgcgggtcatcctcattctggatccagccatttctggcaatgagacacagccttatcctgccttcactcggggcgtggaggatgacgtcttcatcaaatacccaaatgatggagacattgtctggggaaaggtctggcctgattttcctgatgttgttgtgaatgggtctctagactgggacagccaagtggagctatatcgagcttatgtggccttcccagactttttccgtaattcaactgccaagtggtggaagagggaaatagaagaactatacaacaatccacagaatccagagaggagcttgaagtttgatggcatgtggattgatatgaatgaaccatcaagcttcgtgaatggggcagtttctccaggctgcagggacgcctctctgaaccaccctccctacatgccacatttggagtccagggacaggggcctgagcagcaagaccctttgtatggagagtcagcagatcctcccagacggctccctggtgcagcactacaacgtgcacaacctgtatgggtggtcccagaccagacccacatacgaagccgtgcaggaggtgacgggacagcgaggggtcgtcatcacccgctccacatttccctcttctggccgctgggcaggacattggctgggagacaacacggccgcatgggatcagctgaagaagtctatcattggtgcgtgggtccttccccagggcctttgccgacagggcagggagttgggatccttagggaagaggtgaggaggcagatcatgagagcctggtgtgacacagctgtgcttctcgttgcaggcatgatggagttcagcctctttggcatatcctatgtgagtgtccttgggatcctcctaagcaccaagaaggtggggacatctttcagaaatcatcagcaggctccttttatttcctcttgtttcagacgggagcagatatctgtgggttctttcaagacgctgagtacgagatgtgtgttcgctggatgcagctgggggccttttaccccttctcaagaaaccacaataccattgggaccagggtaggacagtggcttctacctccactgttttatgtcacttgaaagacagtctccatttctgtgctaaaagtaatgcagtctctatttcctgggatatctttaaaaaaaggtgtttttttttgttttgttttgttttgtttttttttttgaaacagggatttactctgttggccaggctgaatcgtgcagtgtcccaatcatggctgactgcagcctccacctctggggctaaagcgattgtcccacgtcagccttctgaatagctgggataaaggcacatcccagcgtggctacctaatttttgattttttgtagaaatgggatcttgccatatttcacaggatggtctcgaactcctgggctcaagcgatccactcgacagcctccaaaagtgctgggattacaggcgtgagccactgcacccttaaaaattgtgaagacctggtgtctcaatgaaccatattcctcattgtgctttagattattatttttttcctgtatttcaggcagaattttaccaaatgttccaaaaagaatgtcttacagtgaaattttatcagctgtcttaggagagctttggtgactctttccggtctattaagaatattctctgggcctcatgtatagttttcttttgtttagctgtgagtgatcttcaattggagtatgcttttagtgaccttcttaaatcccctagaaattccagggcgagctcccaacactgttctctttctcctttagagacaagaccctgtgtcctgggatgctgcttttgtgaatatttccagaaatgtcctgcagaccagatacaccctgttgccatatctgtataccttgatgcaaaaggcccacacggagggcgtcactgttgtgcggcctctgctccatgagtgagtgtccagcagggatcccgatgactaatggatgacttattgcattctatgtggtagcagttgatatacacaacgcttccaaattaaagacatgatggccttttgacatgagctcttcagacacaaagtatacctgattactgtctttagcacagtgttatacataccgtaggtcataaaaaaagggtatttattgaatgacgaaaattgaaatgatgcagtacagcatagaatagtttcattctaatttggttgtgcaaaggcctatcttatgtagcagttttgttatatggacccaggtcacaaaagaaggatttcagcaagagaattgagggacgagggccatcctcacatttaaaatgtgccatggttaagaaatgaggtaatattttacaggagagaacacatctacatcccagcatttctgaagtttgaggcacatcccatggggaaagcagaggctgggtgctcctgatgaagctaggcctaggaacaaagcaaggatggctcaggggcagctgtatttccgacttggatctgaacttgaggagcttcttcagagtgtcgggctggggctctgttgggctctgttgggcaccttcatttccctttccaggtttgtgtcagaccaggtgacatgggacatagacagtcagttcctgctgggcccagccttcctggtcagccctgtcctggagcgcgtgagtatggaggcctccgatgaggggaggatcccagctgtgaggcttggggaaaaggacgaggagaagaggcctgagctggtgggggtcctgagacatggtttcttattctacctgtgtctcttcctctctttctgagctgaagtccatcacttaggtgttcttggcactcagctccttcatctttaaaatgagcctaacaattctggttcgtaggatgatcaagaagaaaacacctcatggaatagtcaatgacacaatcatttcttcgttaactaaaataattaatagaaggtcagatgggggcagtattgtaaaaaatttataacagtcctctagcactattacaacttttcagaaggatgacttggcaatgtgtgtacttgtattgctgctggctaacccttcccttcctctacaggagctcctcccagcagtaaaagccatttctttacttctgttgttgattaggcttctgattaaaatatcaattaattgtacctccctcaaatatatatatatatatatatatatatataaatatatatatatatatatatatttttttttttttttttttgagacagagtctcactctgttgcccaggctggagtgcagtggcatgatcttggctcattcaacctctgcctcctgggttctagtgattctcttgccttagcctcttgagtagctgagactacaggcatgtgccaccattcccggctaatttttttttctttttttgtatgtttagtagagatggggtttcactgtattagccaggatggtctcaatatcctgacctcatgatctgcctgacttggactcccaaagagctgggattacaggcatgagccatcgcgcccggccccaaaatctcattatacccacaaaattttcttctgccccagacacaacctcccttgtttgtctctttaagagtcaaaggggtaagtctatgtctataagcaaacagtgatttattttttcccgaagtcctggatatcaaagtgctttatgaaagccacttgttttgggtagacaaatctctggtttaaaaaagaaaacaggaagaaggttgccccagttgttaacctcttgggacatgaggcagctgggtccaaagccatcacaattatttcacctctttcctaagcagtttggttactctgtcctggaaaatggtggcactgcctcaccttgtttgtgtttcattttagaatgccagaaatgtcactgcatatttccctagagcccgttggtacgattactacacggtaagtttttctgaatgtttatataacacgggaatgtggtagagagtacaaaggctttaggtccgatagaccttaggtcaaatgctggctctgtaacccacctgctgtgtggtcttagagaagccactttaacccttgtaatctcagttttctcacctccaagtggggtaagaccactttcctcatagaaccattgtgaaataacacataaagcatctcactcagggtctgtttttttgtgggtgttctctttgtgttagtttttaatatttctttatatcactgctatttacaatgttgtgtaaaggcagatgctagccaacatctgagattgtgttgcaaactatagtttttgtttttattgttgatatctttgcctgctgtaagtttgtaagcatagaggccgttttgtctcttttgattaaatacctccttccatagcatagatgctcaaagaggggcgctgcacataattacataaggcacacaagtgattaggcaatgtgcaaaacacacacagaggtatgggacccaacccttgtgtgtctaagtagtgcaagtgcatttagaaatgaggaagcaatgaagagctccttgccgcatagtttcattgctagtatgattcccaaagactcagctgggaagccagggtcttcccgggcagctctggggtggtgggctcttgctgggaccctgacaaatcagaccctgattcttggggaagaatcaaaggaggtatttccttcgtttctaactaggcctcttcttctgactttctgaggagaacatagttgagggctggaaatacaacaaaggggtacaagcagggatacaggaagcagagcatgtgctggcccctttcatccaaggagatttcagtgagattaagtgaaaagtggagaaggatgtgcaattttgttccttctcttctcagtccattggagcccaagtcctctccacagccccagactcctcttcctgctgctagtctggatctgcccttagggtggtaacatgttaaggctctgctatgtgtgtcccagccaggcgtttcccaggaagaggtggccagctttctttacgtgagactggcctttgtcctgagtgtgcatgttgagtctcccattcactaccagaagatatctttgatggaagagggaaagacaaaagaagtcatggagcaagctgtttagaaaaagatgaaattgggccaggtgtggtggctcacacctgtaatcccaggactttgggaggccgagatggacagatcacaaggtcaggagatcgagaccatcctagctaacacggtgaaaccccatctctatgaaaaataaaaacaattagccgggtgtaggggcatgcacctgtagtcccagctactcgggaggctgaggcatgacaattgtttgaacctgggaggcggaggttgcagtgagctgagattgtgccactgcactccagcctgggtgacggaaccagactttgtctcaagaaaaaaaaaaaaaagaaagagatgaaatttttaatgtttaattaaaatgaagatgaatctcataattaggattaatgaagaagtgtcaccttaattaatcttcccaagtttgggtaactattactcattctagagcacaagctggcaaactatggcccacagccaaatctggttgttagctgatttgcaaataaagttttagtggaacacagccatgcatatttgtttgcttgttgtcaacaataactgcttcttacctgtaaagtagcagctctgaaatgagaggattttgcctaccaggggacatttggcaatgcctggagatatttttggttgtcacaacaggctgggggtgaggaggctatgcggctgacatctgaggattctgctaaatatcaaaaggcacaggatagccccatcgccagagaattgtctggccccaaatctcaatagtgctgagactgaaaagccctgctctagttgagaacatgtaggatggaaggatggtcccttaggttctgatacaggtgagagtgtagcagttcttcctgttacacatcaggcaaatgtagtttgtatggtggaagcaaaggtaagagaccctaacaagatattatagcagccttgcgaggttttatgcagcactgtgcgaatgcagaatgggtaatagcaggtatgttgcaaagggtgatgaacaggcataagttcagaggggaggatgagatgtctggcaggatgcattgttcagggaggggcctgtcctctccttcatcatcttttaccttcttctgcccccagggtgtggatattaatgcaagaggagagtggaagaccttgccagcccctcttgaccacattaatcttcatgtccgtgggggctacatcctgccctggcaagagcctgcactgaacacccacttaaggtgaatgacaggactcaggttttcctttacatttcagttagctcaacaatttgtgatgaagtctaccaaaatgtaagcatcactttcaaacccacatgcaattctactcaacacttgttttttctttgttttgttgtttgtgtgttaatctttttcagactctatactttttgtctaattattaacaactcttttaagtctaagggagtgagatgaaaggtctaagaatgtcattttttaaatctcacatctgacatggaagtcaaaataagagcaaccacaattcacaagagcttttcagaagctgttgttttagaactgtatccagtagattttgaaagactgtaattcatgtccttccttaaaccctttgaatttcttttcaaacacgctaacagccaggtggtcagcctccttggtttgccaggactgatgcattttagcaccagaactctcctctcttgagatgcttctcaattctgggtaaaccaggtcagttgatgcctctatctgccttggccacactgctcacccatgtttctttactcttgaatcacttattctcattttaggagggtcaggatccactttccaccctcctagaatctcaacttcctctttcttttctcccgctaagagatttctttcttgtgattcaaaagtggattcaaaaaaaccctcaaaagtctatgtcactgaattttgctttatacgtaattgattccaaaattatagattccatctgtactaaagaggtgtgcatttatatcttcatgcctttgagagtattaacctatttgtctttaatagactaggagttctttggaagccagaaacctgtcttttcttttgaacctctcttactgctttaatttttcaaattctagacttttttatgatactaatgggaaatatccctaaatccaataccagttggcttccattttctaactgttcaccttcaagctgttctgtacagtgataccaaattgatttttccaaaatgaaaatctcaactggttgctcccaggcttgaagtccaaagtctttcattaatagggtattcaaaaccaatcacaacctggttccacgttaccttaacaactcttatctcctgccatacctccatgtacatacagaccaggtatgccaaaaaactggcgatttcccaaacatacccatgtattttactgcatgtgggcttttgaatttatcctttccaacatctgtgcctggtgtattcttaatgatccaaatgaaactttacgtttcagcagcaagaagtctttccctaatcttccagcagaggaagcactgccacttccaagtttctggtcatttgtaatatatatttatttgctccttagatgattttgtctttcttctttagcagtgttagcatttcaatagtagttgcatactctgtgcatgaaaattgtagtatctgaagtgtttaggaccatctaaatctattgttagttctttgttgctgactttcctttatgttgacttattaccttgtgtgcttggtgattttttgtttcatactgtgataatcttaagcatctaaatgtgggtctccttcctccagagatgatttgccttctcctctatttgcaagccaggaattccttccatctgacatcacgttaacttccatcaaggatcccggcttcatgtgggaatcagaggttcacattctgtaccttggattactaggcttaatagcccaattttaaccttgctgtgggaatttgccacatggagattctaggttttgcttactaagcaccctttgagttctagctcagtgttttgctatcctgttattgttttggtctcttgagtatattccttactgtcttgcaaatccaagaacattttagcaggaatatatgttataatttatctaggatcaggtaatattttactgggtaagtctccagaagaatatacagtctaccatatttgtagaactgtgtttctggactcctagaatatcttaaatttgtgttgttttcactgtctgcgttcattttttagtgaatgtgcctaatttttcctataatattgaaggtcgttcaggtcaggggttgtgatttattaatttttgtatctcattgacttcctagaaatgactgctactcaatacatgaatatttaaagaaagcagatgattttgttgataatggaaactaactctcttgcatagtgaaaggctgaactgtggaagaatacagtggagaatgtgagtccagtgagagacagaggaggaataggaagagcaggaaactgagaggttgcctagagagtgacagagtgaggagagattccaaataaaaattgctctctatcctcttcttcctctatgtccatctactctaccatgtctttaagtaatgtgttgtgtttcctattctaaattctaaagtagatcattagaatgatttatttttctttcaaaacaaactaataataaataatcagatacattaccatttagtagatggaccttagtgtatgttgttgctttctgagtataaatggtccttaggcaggcgaaaatgtatcttcctcacagcactggacacttctcctgagggcatcattgctaaagtgatctgactgaaccagttattgcctaagatttctttctcttctcatactctgtattccgaacagtggttgcagaagcagcttttatttgagctattgcagtgcctctggtgcttaaattcttgcctccaacgtagatgttattgttaatgtttggggtgtttctatctcctgtgacactgttgatattatagaaaaatgcatctgtcgattttgtgtttgtacctcaagaaacagaaccatctgctgctagtatcttttccagtttgaaatttgatggaaatattctcagcccagttggcaaaattgtctgactcctgtctttgtctcttgaatcttgttccccacagtcgaaagaaccctcttggtcttattattgccctagatgaaaacaaagaagcaaaaggagaacttttctgggatgatgggcaaacaaagggtgagcgctgttacaataatgttgctgtttcccaacctgcgcctgtgacttatggtccttcactcctgctggtcattcagctgtgggagaaatctcagcaggcacagtagcaagagtcacttaagtattttgtttctggttgcaccattcagggatagtggtggacgaactactgacgaaagaaaaatgcatttgtatctctgacagttctcccattcgccagtgatacctataatggctcttattttattgtcaatgggtgcttagatgagaaggtttcaagactgttccctaattctatgttaatgtcttcctccgaaaattcttatgagcaaatgttgacgatataaaaatcatgcacctgccagtgaggcagtgagaatatactgttctagtgtgtactcagctagccatacgttttagcatatttgtgggtccagtatactaacaattcttgttcttcaagtttaggaaatagattcctttgaagcatatgccttggaagcccttggaagggaatctttgcaatgttctggtagaaaagagaaggaaaaacaatggcttggccttggagactcttgtccctctaatccaatatgtagattaaaaattaattatttatttggtagtcaaatattttgttggcaaataaagattgaatatatttaaggtggacgatgtgaggatttaatatatgtaggcatagtataatgattaccacagctattttaatgaacacatccatcactaccaatgctgcagactggatccccagaacttattcatctaagaactgaaagtttgtacccttgaccatcatctccccattttccacttctgcaggctctaagaacaactgttgtaggctctgcttctaagagatgaacttttttagattccacatatgagtgagaccacgcagtattggactttctgtctctggcttatttcacttagtataatgtcctcctaagtcattcatgctgttgcgaatggcagaatattcttctttctatgtctgaaaaatattctactgtatatatgtaccagaacatctttatctattcatccactgatagacacttaggttgttttcatatcttggctactgtgaagaaagaaattaaaaattgaaatgtaagggctaaaattgtaaagctcctagaagaaaacatagcaaaaaacctccttgacgtagtcttggcaatgactttttggatatgataccaaaagcaaaggcaaaatgccaaaaagtaaacaggcgtgactacatcaaactaaaaggctcctgcacagcaaaagaaacaatcaacaacatgaaaaggcaaactacagaatggataaaaatgtttgcaaaccatatatctcagaagagattaatatcaaaaaataaggaacatatgcaactcagtagcaaaagatcaaatgacccaattaaaaagtgggtgaaggacctgaacagatgtttttccaaggaagacatacaagtggctaactggtatgtgaaaagatgctcagcatcagtaaatgacacaggtatgcaagtcaaaaatcacagcgagatgtcacctcacacctgttagcatggaaatcataaaaaagaaaggagagaagtgctggtgagggtgtggagaaaatagaattttttagactgttggtgggactgtaaattgttacaaccattatggaaaatagaatggaggttcctcaaaaaattaaaaacagaacttccatacaatcccatgaattcccacttctgggtgtatatccagaggacatgaaaccagtatctttaagagatatactcactcctcccatattcattacagcattacttgcaacagccaagatatggaaacattctaagtatacattgatgaatgaatacaatggaatattattcatccataaggtaaaggaaatactgccatttgtgacatcaggatgtaactgaaaagagtgggagtgtgaaatctgttcttctgtggtgggcaagccggagtctgacttgtctttctgtcactttcagatactgtggccaagaaagtatatcttttatgtgagttttctgtcactcaagtgagtagcatatttttatgaatcttaggtgtgggctttggactgaccattagcacatctgtgcttgtgtatatgtgtgattatatttgtaactttatatgcattattggctataggtgagcacatttctatttatgatttcatcgatgttttcaaaaggaggcattaatatagcaagtagtgtttctaaatatagtttttaattatctgtgtgtttttatgattgtatcaaattagaggattatcaaactaatgttgtacttcttgagcagacactagtagagaaagcagagaggcattcatggcagtggggggtatccagtctggaatagaatatatgagtgacttgagaatctgtgtattacaggcatacctttatgcataattggagttaattgttttgcagaaccacttggaggtgactatttcacaatcaacctacaaggaccccaataatttagcattcaatgagattaaaattcttgggatggaggaacctagcaatgttacggtgaaacacaatggtgtcccaagtcagacttctcctacagtcacttatgattctaacctgaaggtaaaaacccattttgttgagatggtacattgagaattctccatagcaccatgatgtttcttcttgccaagtttgcatgggtccctgaagtaccagggcacctttgatgcatgttttggggaattgagagggcacctttgatgccttttttggggaaaaaaatgaggtggccagagctagaatgagttgggtatttttcttcttattcccttctctgcctatcagtgttcccatctctctagctggtttcacttgcttttcccaaaaatagaataattatgatgagacccaggaacagcaaagttggaaagtggggaatagcctgacattattagactgtgaattttgtatgactagcacaaataagaattggtatttgaaaaaggccagcttggataggaaacttgtggtcaggctttggaggtcttagttaccaacttgaattaattctcaagcagtctcatattgatccttgaatgaaggctgtgctactgtgtgtgagcattgttgggagtgggagtgggggctggggactagtagaacagggaagtacaagatggtttagatttagaggagactgggagaaggatgataatctttagaatgtgattttattactccagacgtgtgagaactttaacttgggaagtgctgtctagagaagcatcaaagataagaaaaatatatggaaaatattaaatatttgaattaataggattcaaggaaggtttcaaatttgcagcctttatgcttagaaaaataaagatgctgggatgttagaagtggaaagaaagatgattttatttccacctctcaattttgctgttgccaaaattgaaattcaaagaaatgaattagaattcccaatttgccctgatgtgattattattcattgtatgcctgaatcaaaatatttcatatactccataaatatgtatacctactatatactcattaaaattaaaaattaaaaaaagaaatcatttgtccaatatactacataaatgcgagcatgataaccaggtcatatgattcttattgctgtgttctttctaccactccacgccaatgggggatgctggtttggggactggagagcaagaggatcagctcactttgagatgacaccatgtgtcatgctaaagaggaagtgcagaagacacccttccagacaagacacagagggctaagaggagttagggtagaaaagaataaggggtgatcgcgacaggttttatttgacctaattgttttcattatgctatgtacaagattctgctagaggggagtcatatgccctgttactgctaaatagattcccccactgtacagttctcttcttataagctaaagtgatatgttgcttggatggttgaaagtctggactgatgtctatttgtttttccaaaataaataaataaataaagtcttagattttgcaaggcctttctcccaaagatgaatttccttgtgatttctgcattcctacaggtcgccattatcacagacatcaatcttttcctgggagaagcatacacagtggagtggagcataaagataagggatgaagaaaaaatagactgttaccctgatgagaatggtgattctgcagaaaactgcactgcccgtggctgtatctgggaggtaaccatgctgatggggttcatgtgcatgaaaatctccacacctaatctatagtttcttaagcatagcagtggcacttatataactacttaaaatccatagaaaggacttcctaagggacatgatctggatgtgacaagtaggtggggacatgtggaaaactttttaaaataaatattttgcttggagaccaggaaattaaatttatgttattgccaagtgataagtgataggctggttttattgtcatataaaatgacttttctaaccctgtttaggttagagaactttaagaccacatgctgtgctgatctatgactttggccttacttttcaggcatccaattcttctggagtccctttttgctattttgtcaacgacctatactctgtcagtgatgttcagtataactcccatggggccacagctgacatctccttaaagtcttctgttcatgccaatgccttcccttccacacccgtgaacccccttcgcctggatgtcacttaccataagaatgaaatgctacagttcaaggtaaacacggtacatatatcaggcagtgataagacccttttcagttccattatctttttctggttcaggtcacacaaccctaaaataagttaatcatgctacattagactatgtcattatccagagaacattgagaaatcattgagggaacaatgagacctgccctaattttcatttggaaaagattactgtggctactgttaggaaaatggttgggagagcaagagtgggtacggagagacaagttgggaggctgccagttaggcaggtcaagtgagggcttaggtttggactaaatactggaatgaaggtggagaacagtgcacctagttgagattcaggaagttgggttacagggtctggtgcttgattgaaagcaggcgacaatggagagggaagcatcaagaatgatgaccgcgttggtatcttgcatcttaatatggatggtgctgacatcaaccagaatgggaatactgaaaaggtttgtgcttgatcaatgtaagatgatatgttcagtttgggatactgaatttgagatacgtataaaatagccaccaacctgcagcgatttcatttctttccagaatttaattgcatttaaagactagggatggactagctgttacgtctgcttctctattaaactaatcttctcaaggataggaatgtgccctttcctctttgtgcttctgaagtctaatacagagcctggcagatagttagtgctgtaatgtaattgacagagtaagtgaaagtgatcaggacattgtcacattgcctgaaaatttctttacaatctgacatcaacccgaattctgagtttttgtacatcgtctaatgcagggatgatgctgttgtatgtttgtaccctcatcatagcactagcatgttgtaggcacctaatgggtttgaagtgaatgaacttccttggagttctagccttaaccattgactactctacctcttgaccatacagtagctctttccaaaatatttgcctctttctggcccactttaattctctctgccttcgtggttgttattcttcaccagaatgacttgatctcttttctgtgtttggttaatgactaccaagtttctaatactctagattgtatttctcctgggagaccatctcagtctcccagaaacaatgttaggcatttccttctctagagtctcacagcacttctacatagctctcccttagcacacatcacccaggtgttgtgagctgctctcttacacttctcatttgcttgtgaatttcataaaaccataacactgccttattgagctcacatccctagtgtcttgtgcagtgtcaggcagggatgtagtaggtactcatgaatcagtttagataccaccttcagcaaggacattctgattattttaatcaaatagatttcactttggggagacacgttatttttcaattcagaaaagttttaaggtatttatatattctcatatacccacagaaaataacaagtaacatattcataaataccacgctgattccagaatgattttctacgttagcaccaatgtcacaatgcttatattgatgcagtagaggccttagtaatgagaaatgacagacaaacatattaaatctgacattgttatttgatgtgttaattaaatctcagacatcataaacttaaagaagacagaaacatagcatctgaacttttgtccaaaaatcaaaaaggttctgctaagggtataggtttcaagagtagtattcttgcctaaaatcgttttcctctggcctagatttatgatcccaacaacaatcggtatgaagttccagtccctctgaacatacccagcgtgccatccagcacccctgagggtcaactctatgatgtcctcattaagaagaatccatttgggattgaaattcgccggaagagtacaggcactataatgtgagtggcttctagtgtgactcagagttgatggctacctgcgccttcgctgccaggtccattgtccttggatgtatcctggttcaaaacatcacattgtccacttccagatccatggatgagttgtttccttcagacctattcttacaggaaatctttagcattctggaaataattactgaggcagttgagcgtgcctgaggattcatccaacaaatgtttatggggtgccttctctagattaggtgctgctccttatagacaactgaggtttctcttctcatgacaacaaataataagtaaataacagagataatttaagttatagtataaaaaggagattgtgatagtgataattgctgtgtagccaaaagagcagggtaattgagggttatggtgtggttactgcttctgatattggggtcagagtagatctcgccaagaaggtgatattttaataggacctggatgagaaggagccacccacatgagacagggcgaagggaaagagcatttcagacagagggaataggaagtgggtaggccaggagatgaagcgaagctggcatgctaaagaaaagaagtctagtgtggttggagcaatggaggaagtaagcaggtgagtgctgggagaggaagctgcaacgccggttgagggggcagcttcagccttgaaggcttcataagatgtttgcatgagaagccatggaagaagcacaaatgggagtgacatgaggtgagatcctcgtaggaatatcgctttgagtgctacgtagaaaatgcgctgaggggtgcaagggtggaaggcagtgctggtgtggagtgttcccagctgtgatggtgaggggagcttgtatttgtattgtagaggaccactgaaaggaggcagtgagagtgggaaacagatgaatgaagaactcctgggcttttagtggggatatctatgatattttaatcaaattgagtttcagttttgtttgggagatgaacagcttctgggtaggaatcaagtgttctgttgtccttgaaaagtcagctgctggaagcagagagaaaagcccattttctgtttcaaatctgcctttttgtgtttcagttgggactctcagctccttggcttcaccttcaatgacatgtttatccgcatctccacccgccttccctccaagtacctctatggctttggggagactgagcacacgtcctacaggagagacttggagtggcacacttgggggatgttctcccgagaccagcccccaggg

SEQ ID NO: 1671 - DNA, 398 bp, Homo sapiens
  full length sequence of bloodCirc_09521
gtttgaaatatctccattcagctggcattttacatcgagacattaagccagggaatctccttgtgaacagcaactgtgttctaaagatttgtgattttggattggccagagtggaagaattagatgaatcccgtcatatgactcaggaagttgttactcagtattatcgggctccagaaatcctgatgggcagccgtcattacagcaatgctattgacatctggtctgtgggatgtatctttgcagaactactaggacgaagaatattgtttcaggcacagagtcccattcagcagttggatttgatcacggatctgttgggcacaccatcactggaagcaatgaggacagcttgtgaaggcgctaaggcacatatactcaggggtcctcataaacag

SEQ ID NO: 1672 - DNA, 304 bp, Homo sapiens
  full length sequence of bloodCirc_01122
tgagaaagatcagtctaaagaaaaggagaagaaagtgaaaaaaacaattccttcctgggctaccctttctgccagccagctagccagggcccagaaacaaacaccgatggcttcttccccacgtcccaagatggatgcaatcttaactgaggccattaaggcatgcttccagaagagtggtgcatcagtggttgctattcgaaaatacatcatccataagtatccttctctggagctggagagaaggggttatctccttaaacaagcactgaaaagagaattaaatagaggagtcatcaaacag

SEQ ID NO: 1673 - DNA, 342 bp, Homo sapiens
  full length sequence of bloodCirc_12330
cttcgcagaatcaagaacggctatgtgcgtttaaagatccgtatcagcaagaccttgggataggtgagagtagaatctctcatgaaaatgggacaatattatgctcgaaaggtagcacctgctatggcctttgggagaaatcaaaaggggacataaatcttgtaaaacaaggatgttggtctcacattggagatccccaagagtgtcactatgaagaatgtgtagtaactaccactcctccctcaattcagaatggaacataccgtttctgctgttgtagcacagatttatgtaatgtcaactttactgagaattttccacctcctgacacaacaccactca

SEQ ID NO: 1674 - DNA, 536 bp, Homo sapiens
  full length sequence of bloodCirc_05912
ttccgatgaagttaaattccgtcaagatttaatgaatattgcgggcacaacattatcctcaaaacttcttactcatcacaaagaccactttacaaagttagctgtagaagcagttctcagactgaaaggctctggcaacctggaggcaattcatattatcaagaagctaggaggaagtttggcagattcctatttagatgaaggcttcctgttggataaaaaaattggagtaaatcaaccaaaacgaattgaaaatgctaaaattcttattgcaaatactggtatggatacagacaaaataaagatatttggttcccgggtaagagttgactctacagcaaaggttgcagaaatagaacatgcggaaaaggaaaaaatgaaggagaaagttgaacgtattcttaagcatggaataaattgctttattaacaggcaattaatttataattatcctgaacagctctttggtgctgctggtgtcatggctattgagcatgcagattttgcaggtgtggaacgcctagctcttgtcacag

SEQ ID NO: 1675 - DNA, 973 bp, Homo sapiens
  full length sequence of bloodCirc_02086
gtgtaaaaatgaagaaaaaattatatctcatgttgtgaaagagtcagactctgaaatctgcttatactttgctatttacagtaagtacttttgaaacagctgtagacgttcaaatgaaagtagcaatgtggagtggggaatgtgggaacattcatttgtgaagactttgcatttcttcagctttatagccaacagaaaaggagattgttgtgcattctattaaatactgccagtatgattaatttaaagggttacattttattgaaccctggtgtagatgttctttgtcaacccacattcacagctagttagagtgtgtgtagcatttatcaaaactttctggagcccctctcacctcattagcatctgaatctctattcagcagttaatgtccgttactgctagagtgctcaattcttgttttcaataagccagttgtaaaatgtcagactgtcacttacaatataaaaaaccaaaaatgatggtatttgtaaaaatgttatcacctcataaaaacaaattgtaaagacatgaaagtgatcttgctatgctggtctttcagaagtgagttagtacagctactttaaataccagttgtgtagattcccacacttttctaccaatggagaggtttacacaagcataatttaagttacaattacactaattaacatctcatttgcataaattgttgaagtcaaaacaacaaagaattgtctaagaagcttaatcctatttgtccaaaatagaaagattttttttttttaaaaaaaaactatgctctaaaaattggcagcttaagtatgtctttagtatgttgagctgtgtccttttaaaaataaatgttttcaattttcttaataatatatttctctattctttttagaatccttcatttttagtatacttttaaaattgaacacacacaacactttggttcctaaagtaatgataacaagaaattaaaatcaag

SEQ ID NO: 1676 - DNA, 1226 bp, Homo sapiens
  full length sequence of bloodCirc_10343
gtacaggtgaacaaaggcagagtaaactgtcaccccagatgcaggtacatcaagacaaaaccctgccaccagctcagtcatcaagtgtgggtccagcagaagcccagccacagactgctcagccttcagctcagccccagccccaaacccagccccagtccccagctcagcctgaagttcagactcagcctgaagttcagacccaaacaactgtttcatcccatgtcccttctgaagcacaacccacccacgcacagtcatccaagccccaagttgcagcacagtctcagcctcaaagtaatgtccaaggacagtctcctgttcgtgtccaaagtccatcacagactcgaatacgtccatcaactccatcccaactgtctcctggacaacaatcccaggttcagactacaacctcacaaccgattccaattcaaccacatacatctcttcagataccttcccaaggccagccacagtcacaaccccaggtacagtcttcaactcaaactctttcatcaggacaaactttaaatcaagttactgtttcatccccatcccgtcctcagctacaaatacagcagccacagccccaagtcattgctgtgcctcagctgcaacaacaagtccaggttctctctcagatccagtcacaggttgtggctcagatacaggctcagcaaagtggtgtgccccagcaaatcaaactccagttacctatccaaattcagcaaagcagtgctgtgcagactcaccagattcagaatgtggttacagtgcaggcagccagtgtgcaagagcagttgcaaagggttcagcaactcagggatcagcagcaaaagaagaaacagcaacagatagaaattaagcgtgaacacaccctccaagcttctaatcaaagtgaaatcattcagaaacaggtggtgatgaagcataatgctgtaatagaacatttaaaacagaaaaagagcatgactccagctgaaagagaagagaatcaaagaatgattgtctgtaaccaggtgatgaagtatattttggataagatagataaagaagaaaaacaggcagcaaaaaaacggaagcgtgaagagagtgtggagcagaaacgtagcaagcagaatgccactaagctgtcagctctgctcttcaagcacaaagagcagctcagagccgagatcctgaagaagagagcactcctggacaaggatctgcaaattgaagtgcag

SEQ ID NO: 1677 - DNA, 253 bp, Homo sapiens
  full length sequence of bloodCirc_20291
atatgtttccttctttttgccattctctacgttgtttcctacttcatcatcacaagatacaagagaaaatcagatgaacaagaagatgaagatgccatcgtcaacaggatttcgttgtttttgagcacgttcactctcgcagtgtcagctggggctgttttgcttttacccttctcaatcatcagcaatgaaatcctgctttcttttcctcagaactactatattcagtggctaaatggctccctgattcatg

SEQ ID NO: 1678 - DNA, 420 bp, Homo sapiens
  full length sequence of bloodCirc_14199
atgattaatttagcagaatcaaaagccagccttgctgcaattctggaacattctctgttttccacggaacagaagttactggcagaacttgatgctattataggcaagaaggggacgaggatcatcatttggaatcttagaagctacaaaaatgcaacagagttcgattttgaaaaggataaatatgatatcagaattcccgaggatttagatgagataacagggaagaaggggtacaagaagcaggaaaggatggaccagattgcccctgagagtgactattccctgagggcttattgcagtatattatatctaaagccaagaatgcagatcatcctacgtggacagaaagtgaagacacagctggtttcgaagagtcttgcctacatcgaacgtgatgtttatcgaccaaaattttta

SEQ ID NO: 1679 - DNA, 333 bp, Homo sapiens
  full length sequence of bloodCirc_21045
gtgcaagaattgtttatccgtgattatggagagatttttaatgtccagttaccggataaagaagaacggacaaaattttttgaagatttaattctaaaacaagctgctaagcctcctatatcaaaaaagaaagcagttttgcaggctttggaggtactcccagtagcaccaccacctgagccaagatcactgacagcagaagaagtgaaacgactagaagaacaagaagaagatacatttagagaactgaggattttcttaagaaatgttacacataggcttgctattgacaagcgattccgagtgtttactaagcctgttgaccctgatgag

SEQ ID NO: 1680 - DNA, 312 bp, Homo sapiens
  full length sequence of bloodCirc_14325
accctgaaggaagattgggaatctgaaaaagatttatgtttagaaaatctacgcaaagaactgtctgcaaagcatcaatcagaaatggaggatttacaaaaccagtttcagaaagaattggcagaacagagagctgagttggagaagatttttcaagacaaaaaccaggctgaacgggcccttaggaacctggagagtcatcatcaagcagccattgagaagttacgtgaagacctgcagtccgagcacggccggtgtttagaagacttggagttcaagttcaaagagagcgagaaagaaaaacagctggag

SEQ ID NO: 1681 - DNA, 444 bp, Homo sapiens
  full length sequence of bloodCirc_19798
gtggtgactctcaaaaggaaataggatcatggcagcagatgatgacaatggtgatggaacaagtttatttgatgtcttttctgcttctcctcttaagaacaatgatgaaggctcactggacatatacgctgggttggacagtgctgtttctgacagcgcttccaaatcctgtgtaccatcaagaaattgtttggacttatatgaagagatcctgactgaagaaggaactgcaaaggaggcaacatataatgatttgcaagtagaatatggaaaatgtcaactacaaatgaaagagctgatgaaaaaatttaaagaaatacagacacagaatttcagcttaataaacgaaaaccagtctcttaagaagaatatttcagcacttatcaaaactgccagagtggaaataaaccgcaaggatgaagaaataagtaatcttcaccaaag

SEQ ID NO: 1682 - DNA, 636 bp, Homo sapiens
  full length sequence of bloodCirc_02845
ggtttgtgtttagtgaatcagagggatctgcattagaacagtttgaaggtggcccctgtgctgttattgcacctgttcaggcatttcttttgaagaagctcctgttttcttcggagaagtcttcttggcgggattgttcagaggaagagcagaaggaactcctttgtcataccttgtgtgatattttagaaagtgcttgttgtgaccactctggatcatactgcttggtttcatggttaagaggaaagacaactgaggaaactgctagtatttctgggagtcctgcagagtctagttgccaagtggaacattcttctgccttggctgtcgaagagcttggctttgagcgatttcatgcattaattcaaaaaagatcgttcagaagtttaccagaattaaaagatgctgtcttggaccagtattcaatgtggggaaataaatttggagtattgctttttctgtattctgtattactgacaaagggcattgaaaacataaaaaacgaaattgaagatgcaagtgaacccttgatagatcctgtatatggacatggcagccaaagtttaattaatctcctgctgacgggacatgctgtttctaatgtatgggatggtgatagagagtgctcaggaatga

SEQ ID NO: 1683 - DNA, 203 bp, Homo sapiens
  full length sequence of bloodCirc_03993
gtgataactaccccgtacagttcattccatcaacaatggcagctgctgctgcttctggactcagccctttacagctccagaagggtcatgtctcccacccacaaattaaccaaaggctaaagggcctaagtgaccgttttggcaggaatttggacacctttgaacatggtggtggccactcttacaaccacaaacagattgag

SEQ ID NO: 1684 - DNA, 396 bp, Homo sapiens
  full length sequence of bloodCirc_16545
gttgcacagtgaattaaaagatgctgttgaaaaaaaattggaggcctttcccctgggcacagaggtaggaactgacatatatgcagatgatgaaacagtcagaaaccttcaagaacaattgcagctagccaatcaagaaaaaactcaggctgtggaactctggcagactgtttctcaggagttggacagactacacaagctttaccaggaacatatgactgaggcccagattcatgtatttgaaagtcaaaaacaaaaggatcagctatttgattttcaacaactgaccaaacaacttcatgttactaatgagaacatggaagtgactaaccaacagtttctgaaaacagtaactgaacaaagtgtgataatcgaacaactccgaaaaaaacttag

SEQ ID NO: 1685 - DNA, 253 bp, Homo sapiens
  full length sequence of bloodCirc_06880
ctaaaaaacattcccttcaatttaaaaaatgttcccgactcttaacaccccagttgagaactactgatcttagatgtattaaaggtaagaaaaatttaaatactagagtattagatgacttatttgtcattatgcattgactgcaagtaataaaagttgttaatttgagacttttacaattaagatgactgtattaatgttatttttcctagtaaaatgaatgaaagtaaacctggtgactcacagaaccttg

SEQ ID NO: 1686 - DNA, 309 bp, Homo sapiens
  full length sequence of bloodCirc_18314
ttccaaaagctgagacaagatcttgaaatggtactgtccactaaggagtcaaagaatgaaaagttaaaggaagacttagaaagggaacaacggtggttggatgaacagcaacagataatggaatctcttaatgtactacacagtgaattgaaaaataaggttgaaacattttctgaatcaagaatctttaatgaactgaaaactaaaatgcttaatataaaagaatataaggagaaactcttgagtaccttgggcgagtttctagaagaccattttcctctgcctgatagaagtgttaaaaagaaaaag

SEQ ID NO: 1687 - DNA, 253 bp, Homo sapiens
  full length sequence of bloodCirc_20221
aataatcatgggccagactgggaagaaatctgagaagggaccagtttgttggcggaagcgtgtaaaatcagagtacatgcgactgagacagctcaagaggttcagacgagctgatgaagtaaagagtatgtttagttccaatcgtcagaaaattttggaaagaacggaaatcttaaaccaagaatggaaacagcgaaggatacagcctgtgcacatcctgacttctgtgagctcattgcgcgggactagggag

SEQ ID NO: 1688 - DNA, 193 bp, Homo sapiens
  full length sequence of bloodCirc_07570
gtatattactcgaggggtttttaaatattgtcaggaaaaagaaggaagctcaacgatatcggaacgaagtaagacacatcttcacagcctttgacacctactatcgtggatttttaactttggaagatttcaaaaaagcatttaggcaggtggctcccaaattaccggaaaggactgttcttgaggtattcag

SEQ ID NO: 1689 - DNA, 47785 bp, Homo sapiens
  full length sequence of bloodCirc_02091
gtgtaaaaatgaagaaaaaattatatctcatgttgtgaaagagtcagactctgaaatctgcttatactttgctatttacagtaagtacttttgaaacagctgtagacgttcaaatgaaagtagcaatgtggagtggggaatgtgggaacattcatttgtgaagactttgcatttcttcagctttatagccaacagaaaaggagattgttgtgcattctattaaatactgccagtatgattaatttaaagggttacattttattgaaccctggtgtagatgttctttgtcaacccacattcacagctagttagagtgtgtgtagcatttatcaaaactttctggagcccctctcacctcattagcatctgaatctctattcagcagttaatgtccgttactgctagagtgctcaattcttgttttcaataagccagttgtaaaatgtcagactgtcacttacaatataaaaaaccaaaaatgatggtatttgtaaaaatgttatcacctcataaaaacaaattgtaaagacatgaaagtgatcttgctatgctggtctttcagaagtgagttagtacagctactttaaataccagttgtgtagattcccacacttttctaccaatggagaggtttacacaagcataatttaagttacaattacactaattaacatctcatttgcataaattgttgaagtcaaaacaacaaagaattgtctaagaagcttaatcctatttgtccaaaatagaaagattttttttttttaaaaaaaaactatgctctaaaaattggcagcttaagtatgtctttagtatgttgagctgtgtccttttaaaaataaatgttttcaattttcttaataatatatttctctattctttttagaatccttcatttttagtatacttttaaaattgaacacacacaacactttggttcctaaagtaatgataacaagaaattaaaatcaaggtacagtatcatttatatgtagtagtacagagtaaccatgacttactaggtgttatgatgaaggtgtatgtgtgtgtatatgtgtgcatgcatgtagataagtgtgtgcatttgcacacataagagttttaagctgctcctgtcatttattgatggtcaaaggtttcttttggctattgctggactcttaagattgtcttgtaattgtctttttgttgttgttgaaaattaagggtgtatattaaaggtagtttttacccagatcttatatgtgtgatagctcacatctgtaatcagaaacttactgtttaatggccacccaattgccattagcttcctagagggtgatttaataaactatcttctttaaaactcatttaaaattagagacatgtttgcatacaatggattaatgacgttttcatactaacccacaaaagtctgctgcactttcttttgtaggcctaacattcatttcatatgcattgattattattgttgaacttgcattaattacatcgtgcatatatggacatacaatgtcatctgcagaatttaggattttttattgttaatttttatagtgactgtggattgaggaattaaaattagcatgcttcatttataatagtatttctagtgtttcattagccctaaaaatgtgataagatcaggaataagattggaatgaaaatttctccttaaaatggtacgtcttttgaaaacattttgtttataatatatagctaatcctaatttattacagtctttcaatatattctttaatttgattctataaggcttataaatcactgtctttgagataagtttcttaattcacaggtttgtatcagttgtactaggtttggtgaaggatgtcatcctagatatacagtgtagacgtgctttatgaaacatacttcttcttagggacatttttaaataccaaatgagaatatgtttggtgggccaggtgcaggggatcacacctggaatcccagcactttgggtggccaaggcaggtggattgcctgaggtcaggagtttgagaccagcctggccaacatggcaaaacccagtctcttctaaaaatacaaaaaaattactaggcatggtggcaggcacctgtaatcccagctactctggaggctgaggcaggagaattgcttgaaccgttgaggcggaggttgtaatgagctgagagtgcaccattgcactccagcctgggcaacaagagtgaaactccatctcagaaaaaaaaaaaaaaaaaaaagagaatatgtttggtagaaatctgaaagagaatttatgctgaattgagaccatttggaaggcttcttgggtaaaactgatttgagttgtggatgaaggattgtttggaaatgagagaatgagcagaggccatggtggagagaagagttggagagcaggtgaaaggcgtgagcacagctgcagaagcagacatatgcacgatttgtcctagagcaggtcggttggcgagtttggttagaatggggggtttacatagcggagggtattgaatgccaatttaaagatctaggcagtaagaatcatgtagggtttttgaacagggatatgacatgcttcaagaggttttttttgaaaggattaatcatgaagtccaaatgtagggagcattgaaaacaagagtagagtgacagacagtggaacagtagctttgtctcggcacaaaattataaatcatgatggtttttatttcctgtgccctgagtaatatcataaacaaaatatacaaaatggcaagagcacttttgagataatacatggtttctgattctgagtagtacttgaaacttcaaaaataacattatacgataaaacacatgttatttctttgttatcttaaaatagcaacaaattctatatacgtagaaagacctatgtagaaaaaaaatgaacattctagcctggacaacatagcaagaccccatcttaaaaaaattttttttttttagtcagccaggtgtggtggcctttgcctgtagtcccagctactcaggagactgaggtgggaggatcacttgagcagggagattgaggcttcagtgagcctcagttgtaccactgcactccagcctgggcaacagagcaagatcctttctcaaaacataaagcaaaaaacattatttcctttctcctttcagaggaaaattatttccagattattttttcttatatttttttaaaagttggctttaagggagcacgtttctctttgagggtggcctgtttcattgtcaatatttgctcttcattggaagctgaggtcatgtcagagttactcaggagaaagacctggacttttcttcttatcttttaatggtttatcattgataagtttggacatggtatgcatggtgacttttttcactcttgtcacttttctatatttaccttgttcatagtatgtaatctgagtgccttcaagacactagaaaagatttgatctcaaacaccacattttgggtattttaatataatcaggagaaaagtggatataatattcagacaggaagctggaatacactggcataggtagaagtattcatttcaacattaagtgaatatatatatatttgttgttgtttgttttgttttgtttttgtttattttggttagaatctcactctgtcacccaggctggagtgcagtggtgcgatcttggcccactgcaacctacacctcccgggttcaaactattctctttgctcagcttcctgagtagctgggattacaggcaaaggccaccacgcccagctaactttttgtatttttagcagagacggggtttcaccatgttggccaggctgatcttgaattcctgacctcaggtgatccacccacttcagcctcccaaagtcctgggattacaggtgtgagctactgcacccagccgcaaatatatattgataacttactggaagtaaggtaacatggtacaggttggtagaagaaatatagagaaaaacaggaagctgggcttcccttccagatgtccctagattcaaaggggaagaggcaaaatgtattaaatgctgtcttacacatagactacaagggatttacttggccagggagagaacagggttgattctgagctggagagaatgaggatggcttctgtgaaggagatgacctaaagcagggcctcgaaggttggcaagggacttgcagggacagagcatggagatgggcatatgtagcgtgtgttctggacacggcacgtggaggcagagcacacatgcatagagtgtgtaatgcttcacttccatccttgttccttcagcaagcacccgtgctttacctcgtgctgacccttgagcaaggctgcccgtgagaaacttcccaacttcatgggcaatgttgaaaacatttgtccacttgcccttgccccagagagggagaaggtccacatatggtgcctttgacatgttatcccttggcataaagtttggcccaaatgtacatttgaaacctcacgttccctcgataaatttaaagtatgaaacttttgaaactctaaaaaggtggtgaagaccacagttctccctgttctttttcttctttcactctgcagctggattctgcctttcctccagtggttatctgaggagtgtctgccatgtcttctgtttttttttttttttgccttgttttgaggagtccccttttttcctcccctgggagagtttaaatatgatgctgatttcttgtcatcttagggctcctcagctacaacaaagttaaatggtataaaagcaaagcccaaattagagaccctaaaataaccttggagaaggagagttctcagttatcagtagaattgtcttaggaatttgaggaagcccttgtatacagtgaaaatgagaccctaagttaattaacaaaatgaaaataacttacagtacatatctgccacttccagtactgctataaataattgcaagtgtaaggatttttagtgcaaatatgcagaaaacatgggcatagaaagtttagatgaccttaatgaagaaacagagttggctctgaaactgtgcttagcaggaacaacgttttgtgcacttgataaacactgtcagttgttaaggcatcttctgataggtgaaaagcggttttttgatgcagtactgcctggcatgcatcttctcgatggtctgttatcttgtgggaatgacattcgttaagttgttttctgtgtgcatcccacccaaataaagaatgtttcatcagcaaagtgaattgccgtatagtcatcagactctagaaataaattatcaacgatgactgcagtgggtgaggctgtttgtttatcacatcacttgagaacagagtaaagtgagtttcatattttcctgagtcttgaattctcattttagacatctgttcagaagctttctaagccatggagtattctaaatgagcattttgttaaatggatgaaggaagacttagttttccattgttaggtgaaacctaattaaaaattaaataatgaccttgtgttggcttgtaaattccttatttcctgcatgtgtgagtgtattttgttagaacattccattttaaagcatgccttttttatgacaagaaatacttttaaaatactatttgcttttgaaattacagtagggaatcaaaggatagtctcttgttgagaggaaggtattagaagcatgtagctttatgaactatattttctgtgaatatagcagaattagtttaattgttcaatttcaccctctccagcatgattgcacccatcagggcagttaacagagacaccgctatttgtgttatactaggaattctttataaacttaataaatgaaagctttttctcttataggcccgattctctagtggacttctggtgaaattatgtggctaccttccattaatgttaatggaggttatggatataaatccctccatagtgatggaagaatgagccccagagagaagaatgtttctaatgaatcactggattgtgatataggattaacttggtgtccctaataccatttttttttcctcctgaaagtttaaggtcttatgtttaggaactagtttctctccaccttaatcctttattgtcaagtctgcaataatgttaagaacaggaaaaaaaaatgtagattcctggataggcacagtttttatattaatgtaactatataggcatagtttttatattaatgtaactatacagcacctatttttgtgttttactattacttggcagacatcttgagtgttttacaaggttatcgtatatttcactaataatcgttgcttgataatttggtgtcctgacagactgcagtttattatttagtattaaagctctcaaatgtatttattgagcacctgctgggtacaaggctttgagcttagtgatgaaagcatatgacatagtctgtagcctcaaattttctataatctcgtgataaaagtaggtaccagttcattagttgctttccagtggggcacaaattatggaacatcgtctggctggccgggcgtggtggctcaagcctgtaatcccagcactttgggaggctgaggcaggtggattgcctgagatcaggagtccaagaccagcctggccaacatggtgaaaccccatctctactaaaaatacaaaaaatgagccaggcatggtggcaggcgcctgtgatcccagctactcaggaggttgagacaggagaatcacttgaacctgggaggtggaggttgcagtgagctgaggccgcaccactgcactccagcctgggcaacagagtgagactctgtctcaaagaacaaaaaaaaaaaaaagaaaagaaaaaaaagaaatattgtctggctaaagaaaggaaaagaattcttattcagaatcagcatgatcacttctgggaatctgaatggagaaaataattctatatgtaatgatgttttcaatcaatattattttaggtggtttatttattcagccaactgttgttggctgcccactgtataccaggcagtgtgctagatactgggagtacagcagtgagcagcacagagacagccctggtctcatggagtgtgcactttgagtgtgggaaacagtatgtgggtacataaacaaaataatttctaatgtgatagatctctaaaggaaacaggcaaggtgatagagaataactaagaggacctgctttagatgggaatgtgaaggatgaggccgcattcatactaagcatccaagtaaggagaagaccaagtgcaaaaagtttggtcgggatgagtgtgtgtgtgtgtgtgtgtgtgtgtgtgtgtgtgtgtgtgtgtgtgtgtaccagagactgaaggccattatggctggacagttaagggagagtgacctaaataaagttcatattggcgggagagcagcttgccacagggttacacagaataggcagtggtggtaaaggcagcatttgaatccaggtccatttggctttggaatgtgctgttatagcagcagagggcaagtgtgaaacataattcaaggaaataattgctgtagccatccagaccagaggaggatcgctttgatctaggaaaacatctcagtagtctttgaaaaaatgtacagaatatgaaagatattataggtcttttcctcctataatacaaccaggaaattattcaggctaattttttcagaaaaattattacaataaattatgatctccctttgaaaggtataatgtattcaaacctttttaattagctaatcttttcctgtgaaatcttaaatatttgcacgtataattggtaattttagcttttatgtaggtatgtttccccctggtgttacttacaaaacctggcttactcaaggcccaaagtccaccccactagtaaactctctcgtctctgttcctgtgccaagtgctcttcctttgttaccaggtccacataattaatagctttatcatatgaggtaattcagttactcagcaaaacaaatgatatacacttttagaaatagctctagaaagtaaacttgaacgtaaaattgtttagtaagaggaaatttctgtttgtctttaattaagagaaactgtatggaaatgtaagctaaggatgcattaatcagagaagttggcattgcactgttcttcatttttatttggcatagattgcatgggtgctcattaaataatttgtatgactgaaataacttgtgatagttcttgctaaagttttgcatggactcagactaaagaaactttaaaatttgaattaaaaaacattcaattcttaggtttgaaggtttgagttacttattataactgaaaatctttattatcaaaatgtgtgttcattatagtgtttgcttgccttcttgggtgaagaaatacttattatgagagtatgtagattttccgtgaagaattagtaatcatgcatcaggttgatacctggtgagtagatatttgtatttaatgctcttaaattttaacagccttgcctctgtatgccctgctcatctgtgtcttaccaactttgatattgtttgaaaaataaacatttgaaggaagaagtttgcatatttagagggttggtagttcattacctgcatgtaggttatgcccacatcgcaaagaaatctgatctatatgggtaacatatttggataatcaaggccaaggtaaagggattcattcccccttcttgaattttatggtttctgtatgtcaaaccagatttcattggtttaaatcttgtggtgtacacttggccattgatttggtttgagctctgtaatatttgtaattatgtgagatgacaagattgaattaacttaattgtagagttttacatagtgtctgtatcaacatcctaataaaataatatgaaattcaataagtaatgccaagtgggacagtgagccactcacataagcttactaaacttgatatattcttatggcactcctccagaatgtagaagaaacacatttatctaggtgattagtattctttctgtctgccagatttaaggattgtttggaaatattgttagaatcaaaatcaacgtttgttactacacagggttgagcattccaggcacactctggtcgttttgttattctaatgtccacttatttcatgtctgccgtgaccgtgacagttttcagtcacacagagctgccatcaaaagagtgataagcttgtaagtgaagcctttggggaagcaataaagtcatttttctggtcccatctcaaaagacattattggaaatttatttaaaagtgatcaaggtagcacatacgaggccttctacagtttgcattttggaagttattaacaatctgcagttaagtccatttaaaactgaaagtggctcttccacaaactactttttaaatagcttgctggttctaaatttaaggagaatggaaatattggaaattaaaagtcaaaagaaatttctggggcataagatcctttcaagtttacaatttctcactttagatttaaaacttgaacacggccatactttgcattttatgatatctaattagtgccttgtaatatattttgtgaacagtatctgttagccataatatcagggacagtttaaaaaatcttcagtacatttatgataaaagtattagcattgtaaggtcttaaattgacatctaggacattaggaaatcaaatttaaagcattgcattgtctgttactcaatggagtggactgaggacagcgtgtgacttgtgtactgcaaatgatgcaatagctaaatatcctagtgtgagttaaggttgattaagtgatcatctttaactctgcttttcccagggctctttgaactcttgttttattaggtaatatgctatgctgttattttattgctgtttaaaaaaccttctcttttgggaaagaaaacatgtgaattctttggtttctagatagaaattagcaatcttttgctcggaatgtaaaagtatgctgtattatcacaaactgaccctcctcctccccaagaattctagggagtaaaatgcgtgcacaggaaatcagaaatggatcaacagagttataggttttaaaaaaactgccttgcatttttgccctggaattaattttcagtgaaaattaaaatattttttctgttcatctggaatcagtttttacttcattagcaggaaatggtaaatatacattcagcacaaatagagttttctttatgggacacaggatttgtactccataggtagatgtgtaacataaaagaatctttctgctctccttgtaattttctccctcttaccctcaataagttaaaagaaaggaaaattttttaacctaacctgttaggaaccattttagtgtagcctctagtattttgataaaacaaaatgttcactagctggaccctggtggtgatagcatgaaggactggggtagaactctctttttcattttcttttaatcctgaagttacatcactgtgcagtcagctcaacttgtgtcattgcagtaggaagatatgtaggtggaaagctattccagaaggaggctggagctaccttccctgacaagaaaaaaaatccaagcaaatacatacataaaaagacactcaaagcatcataggatgttatagttataagggaccataggtttcatttaacgcacattttagcatccaggtcctacataaaatgtatattttgtgattgtgaatgggagttttccatatttaaaagttaagtttattaatgtgtcattttacccatcatgtatttgtggccatttttttaataccacgaatgggaacatactgtatcatagtttctttttatttgtctggatgcttgtgtatgccttttagtctactaatatgctcacatgtgcaaactaacaagagaagatggcaatccggtattataaactggtaaagagttatagtgcagtaagactggattaactgtgctttcagcagtcaagttgctgtaagagttatattgtaaagttttagactaacttgcatgtatcccagagtttgcacggtgttgctgagtgtctcgttagacatacaccctacctactattctctcctgacataaaaaaaggtggtaattgagctggcatctagaaagtggtggtagcactacagattgtatcactaatcccaaacaaaggagttgcaaaacacctttctttaaatattttctcttcatggtgcaactggggagggccaaattccagccttaataaagttttaacctgaccagttggtagaaatggcagagtaatagaatgtttggtccagaaaccaatgtgtggactgtgtctaggattagactctgcatttctgtctgttccagatgagctgctcatttcttttctttttttaatttaaatttttaagttctggagtacgtgtgaaggatgtgcaggtttgtttcataggtaaatgtgtgccatggtggtttgctgcacctgtcagccatcttctaggttttaagcccagcatgcatttgctatttttcctaatgctctcccccacccagcccaagctcttcatttctactcagtacgtatgtccatgtatccaggagaaatggagagttctacttttggattcttctagagagattccctgtgggacttctaacccctaatcagtattcttccgttgatgataatctacttaaatgatatcctatcatcagaatccctttatggaattatctttgtattttgcacgttcttccattctagcttctaaatgtaatttttcctcccttaaatcatttttctaatggagacaacattcaaatacataggacagagcccacagccagggcgggaaacctgcatagtgaggctggttttgatacgcaggccatcctactggcagctgttttgtaggcagcttcatgtaatagtgcagagggtacagagagagagacctacactgtgatttctttcgtttgtatattttgtattgaaattgtagattttttggttggaatttatttgagatgattcaagacattttgcatagtactcaaatataggtgaaagaatttcaagtttgctcattttggcataattctaaaacaaaagtgttactgttggatctgggcatgtgatgggtgaatgagtgtttcagtgaaatgacataagtctgtataatttggagggtaatgatgccttagaacaagaataaatctggagcgatggaaaggctccatattctagatgaatgcatgcttcctcttatgactctgaaaaataaaattaaatctttatttatacaaatccagtgaggggggaaggctacatggtttggcttaatgatatatttcagaacaggaatattagccttaacctctttcctcacattgcatatgatatttaatccatcatctttgttttaaacaaacaatacacaagctgttgctggcattggtataaagctgatggtccatctggagagcaggaatatagatcaggaaaataagagaattgaaattgggtgcaagggcagatttgcatgtgtaaaaacctttctgttttaccagcttttatcaaattatttaatactgggcaaaacagattcctttttcttgaagctgagaaagatacctcctcctagaggaagagttgcttcagtgttctaggaagaacaattggttttgaaagacaataaaataatgagccattaggatcatgttttgtaatatagggagttggtgtggaagaggagagagaggactgctggtgtagtgagttcttgttctagctgtgtatgatcattggccagtcgttcagcttcttggccttcagtgcttcctttgactcaagtcaattcagcaaccatttattgaggcaaatgtgaggatgttctgtgggctacctatttagctaggcattgtggatccatagacaagtatgactgggtcctatgcttatgaaactccaggtcttacaatggaaacatactgtggttgaacgatgtagagagtgttgtatatgagatatgggtgcacaaaaacaggaaaagtcaattctgtctggtgtagacaggaagaattgtattacaaatccttcttaaggattttctattttgacatgcaagaggagcaggcattccaggtatttgaatactgagagattcaaattatcagcaaggttctttccagttccacgtttgttgtgttatcagtgtaaaattatttgaatagctttccactgatgagttattagctgaaaagtgtttattgtcatggttgaaagaaaataataatgaaagaagaaacgattacctttagtgataaagttggggccggatgggacgaagcagtgcaatttttttctttataattattcccctatttgaaaaatcaacttgtatatgaggcagcaaacaccttgcagagcagcattcccttttagtttcaggacgtggtggtggatggaaccactgtaacctggcctccctccatgagaggagggaatccaggtggccatgttgaaatgtgcctgtgtgcagcaaggcttctgaaatgacaagagagcccagcagcttccaaagcagctgtgactctggatctcacccatcatctctgcttctcactgttagaggagtgaatctgtgctgccttaggaggcatggaacctgggacttttcttccttgtttaatgtttaattttattaaaataatttgtaagtgatagatgttgatctcgtgacaaaagagagattccctctttataaaactattctaactaaagatcttttgtaagcccatgtgttagaaataaaacttgaatatccccttttttgttgttgtttatgaatggccaataatttattcacatgtgacatttgagctggcattttttcctcctgagatgacagtagcgtccgctgtgttgtattctaaagcaaagtcagaatagccctttgcttttgtcccgattagtagttctgttttgccttcttgccttttccatttagaccttatggtatttcctaaaccttagactgttttgaaaggctttgattaaaatatgctgataaaagaattcgataaccaagttaggaacgacaaggctatctggagaagaccaaatgacttggcagcctaacaaattctattcagagcacacaaagagatcctggaacgttttatagggactcgtgtgtggggaatggtatgaactcaggttacctgcaaaatatggtgtcatatggaaacatttaagagcttatggaaaattctttgaaataaagtggaatgagctagcaagcatattatacctaagaagaaaaacaagagcattcattctggttttttaaggtagctgctcaaggaagggagatagatgaaagtaaattgttttctactttgtacacataatatagaagagatcacctaagcctagttttgctaaccagaccctagacttaaaattagaggtcatgatgtctagccaccttcctctgtaggaacctctcgtgataccctgaaagcctctgcttaaatacttccagagaaaagtgaggaaggtaggggtggggatgaaggtttgcaggaactcgtgttgagtacctagtatctgcaagatactagagtaggtactttatcgccatctcatctgacttatgtatgagtgcaggttttataaccctcaagtttacaagtgaggaaactaagtttatataagtgtcacgaaacttgcttcagttcagatgtctagcttgaggcaaatctgaaattagaacctaggtccatcttcttgcattacactaaactgcctctcaggatgagggagagctcccttcatggctaaggcaacctcttctgtctaataatgcagattctttaaaaattctttcttttatttaactgaaatctgcctcccattaacatctctcattggtcctgattcggcctcaggaggatcacagagctgatgcaattctctttccttatgcaggtatgtttgcaaccactgctgccaaaatggcctctgccatcttttacctagttggttttttttgaaaatgaacacacacacacacacacacacacacacacacacacactcacagaaatatcctcttattgactgcaatccatctttcaacatatggagttctttttgaatactagaggtatagccttaaagaatatgagtatcagaagatactttagtttcatctttccctgcctgattcatcagccaattgttagtatgccatcagtcaagccattaataaaaataatgaacaaggtgaacaggataggttaacttgtagtctatgtataagtttctgaagttgcatgcagaatttagcctatatgtgaatttttctggaaaaatggtcagtaactattgtcagattccttttttttttttttttttttttttgaagacaaagtcttgctctcttgcccaggctggagtgcagtggtgtgatcttggctcactgcaacctccacctcccaggttcaagtgattatcgtgcctcagcctcctgagtagctgggactacagatgtgtaccaccacgtccgactgtccgactagtttttgtatttttagtagagatggggtttcgccatgatggccaggctggtctcctcctgacctcaggcagtctgcctgcctcggcttcccaaagcgctgagattaaaatagaatcgcttgaacccaggaggtggaggttgcagtgagccaagctcgtgccactgcactccagcctgggtgacagaacaaaactcccatctcaaaaaaaaaaaaaaatgccaggtagagcagctcacgcctgtaatcccagcactttgggaggccaaggtggatggatcgcgaggtcaggagatcgagaccatcctggctaacactgtgaaaccccatctctactaaaaatacaaaaaattagccgggcatggtggcgcacacccatagccccagctacttggaaggctgaggcaggagaattgcttgaacccgggaggtggaggttgcagtgagctgagatcgcatcgtgtcactgcactccagcctgggtgacagggcaagattccatattaaaaaaaaaaaaagtattgagaagtactcagagtagagaacttactcccgaatgaatatactaacctctttgaggagagctccccaaatgaccataaattcatatagctcagccatcactagaccgtgtatttcagccagaagatatggtgaatggtcttgtaagatgcctgactaaattaaagtattaaagtatttcttgaattctcttgatattcctggactttgagaaagaataattatgcccttaaaaatggaaaaagagactgcaatattgttatacaggccttttaaaaaaaaagtatccttaaatttttagttacagagttcacttttttcccctacttttctttgttttagattataagcccaggattgttcaccagaaggttaccctttagtctgcaggaacctttgaaaacagatgtggtattgaagaatatctctgtaagcccagaacttatccattgtataaagaattttattttccccagtagaccgggagctcctcaagggcagggacctttgcaagtctttgactccctagcactgaacccagcatctggcaaatcttatttcatgtgactttattttggctgaatggcctaaaaatgcgcttgtactgagcacctaatacatttaatttaatttttaaatttttattcaataatgtagacgtggagtccccctatgttgcccacgctggctcaaactcctggcctcaaggatgttcctgcctcagtctcccaaagtgctgggattacaggcatgagccactgcaccaagccctaatacatttaataaattgtaaggaggaagaacagtggaccgcagtgagatatggtctacagggaaaatgaagaacctcttcaaaaatgatgatcttcaggcctgtaatcccagaactttgggagccgaggcgggtggatcacttgagcccaggagttcaagaccagcctaggaaacatagcgaaaccacatctctaccgaaaaatacaaaaattagccatgcttgtagtcctagctattaatacgtgggaggctgaggtgggaagatggtttgagtccgggaggtggaggttacagtgagccactgtaccccaacctgggtgacagagtgagaccccatctcaaaaccaaaaaagatgacctttattatgtttgacatttaaaaaaatgtagccaaagtaaaagtgttgattagcataaccccgatcacatgttgttgttgaaaatgagcactggcttgcataaaatggacattcatggacatgaaatggacattaatgattttacatatgttaagaagagaattttagacttgagaccttagggagatctgttgatagaattccctatgctctacagataaggatacttagtgaagggactttcctaagctcacagacccagaagagtagtactctttccagccaatggtgatgcttacttatgtttttttttttttttttttttttttgagacggagtcttgctctgtcgcccaggctggagtgcagtgacacgatctcggctcactgcaagctccgcctcccagattcacgccattctcctgcctcagcctcctgagtagctgggactacagacgcccaccaccacgcccggctaattttttgtatttttagtagagacggggtttcaccgtgttagccaggatggtcttgatctcctgacctcgtgatccgttcgcctcggcctcccagagtgctgggattacaggtgtgagccaccgcgcccggcctacttatgtgttttagaaaaatctttaaaatgttaaaagatgacaggtaatttctagaccatatgaagtagcccagttgtcccaggattagtttattatgtgtatatcagccattattttacagagtcatctcacataaatccacacaaccttaaaggattaaaggatggtttctgtgcaactgaaacatatgcacagaatgacaatagtcgtgatactttctttattctttttttttttttttttgagatggagtctcactctgtcgccctggctggagtgcagtggtgtgatctcggctcactgcagcctccatctcccagattcaagcgattctcatgcctcagcctcccgagtagctgggattataggtgcacgccacccgcctgggtaatttttgtatttttagtagagatggggtttcagcatgttggccaggctgatcttggaactcctgacctcaagtgatccgcccacctcagcctcccaaagtgctgagattacaggtgtgagccaccacgcctggccagtcatgctactttataatctgaagttaccagttctttgcagtgtttcacattaggggcattctccaaagggaactttagagataacaaatatgttaaaaatatcgaataaagttagagatgtggggagacattcctactcctacagagagcaaccataccttcctatagactgtgcactgaagaaagggcggaggggatgcgcctgttagagttagaatcttggcttgataggcaaggaaattgacccggtgtggtggttcttatattggtaagaagacccttctttggtttctttttttccagatagctaaagtcaatgtcagtgattgcttcaagcatgatagtcttaccagcctacactctaagcttttcttatgcttccagaatgacttactcagcaatcacttctactttgtattaaaacagttttggttattcaggtaggaagaagagaaaaaaaccaggctgtttccagttgtctggggtttacattatgttacctctcagactgttagtgaaatcagggagactagtggtttttacggcatcagagataccaaatgtacaacagacagatgtcatcttactctttttaagtcatggacaaaaagacagacacattgccctgtaactttcagatcttctgtaacctttttaaacaacataggagagaagttggtacttgtacccaagggaagagaaagttaatgagtagaaaagacagaatttatttaggaaaacgatggaattaagctctggacaaaacatgcatcagtgatgcataacatttttgttaattgggtcttaacaggtttctgactcatatggtaatcattgtagaagtgggtcttactagaccacgccagtggcaaattgcgaagctgtaagaactcttacctccctgtgtgtgtgcacctgagtgtgtgggggggcgtacgtttctgtagcttaatttaggttccacatacacttcagtggttaaacctgagctagactcaaatagtttgtttccattaagaaaatgaatcttttatgtggaccaaggtcaggttagttaatttgtttgcttttattggaataacttttcccattccaattcatcacttaattttaagtggttctactaaaatacccattaaagtcctttacatttctcacagactagggctatgacagattcataagacgtttcttttttcctcaaggcacaaaaggtagcttttctggtcatcaatctagtcttccttgttcctaatttcacaacagtggggcaacattttatataataccaatatgaactctaattgcaaagagactaaatgaaatcttcacacgaagcaagattaattaaaatataaaatgtgcttgactgtggtaaaacatttcttttaaaaaaaatagtatgacttttttttttttttttgctaaatctttcttttttgtacacctcaccctcttcttcactgatgcattttccagcaactggaagttcactctggctaggaaagtaactaaatgtgatgttatcattctaattagtgattacaaaagatcaattaatgttataattaaaaacagtgtctagatctgttgtttgtagtgaataaatgtgacaattactttgttcattgacatagatgtgttgaatttcctccctagattttaaggggatgcattttagtgctgatgtgtgcatttaactgtggacagtaggaacaaggcaagcatattaggggaagagtagggcccctaatgtctaagctacagacatattttagcatgcttgacacctttccttggtatatgatgctatatcagcaacttgtactcattggatctggagcctctagcttttaatattttatcactaaatgcttaagtgtttatgttgcaaaaagaaaaggaaaaaaaaaagattcccacttggactctcaaaccatgtgaacaggctactctatgataactatgtcattaatgattttggtttcatttatggcaataatttttaagttgatcagtcaggatagtaagtatgtgatttttgcagatctggttgaatttttttctgatacagaccaagctgtttttcatacattgaagcctgggaaagctctgttactgttaaaagagtaaccatatctcttcactgaattgttgccaagcagatgtagacttttggagtgtgcccagaaaacctctacagctgatactttggtgacttgttcctactcctggctttactggcacctatttaaatagcagaggaacataattgtgttttggtaggtcaaaattttatacacttctgtagaaaaaattatatataggtaagccaattggtagaaatgaagtaaacccaatttgcttgttgagattagcactgaagatatgctaagctttggttatgtcatttggtcaaaaaagaatgaggaaaatccctcagaaaagttatctgagagatcagcactgaacgtcaagccagcctgtccactcccattactaaaagaaatctccccttttaacttcatcccataaatggatcatgcttcctggatccacccgaggaggacgtggtttagttttagattcttagattacagacttccaccatcagtttcagtattcttttcacgatattaatgttatgaaaactgttagaaatgaggaaataccgccatgtcaggttcactcatggatcaagaaatgagcattttcttaaacatcagtccaaaacaacaaacctcaagtaccataagttcagataacttgggagcagttgaaatcctttaagccacaaagatagtgtcttttggcatggctggtgaaagaaggaagctggttgaattcattgactaactctgttgctggctaaaaagacaattaaggagaaaagggatggaagaagaaaagaaccaaagaaactaaaatctgtttctttttcaggaggagttggaagatgaggagtaacacaacactttagatatacatgttaaaaacttataacaaatcatagatcatactaaaggattaccgaagtttagaacatggctgagggtatagatgtcagattttcttacacaatagtgggtcttttgtttcagagttcactcttggcaagcaactccctaccactgcgttaatttcctgtcgatctttcattcagcaacagacctagagatggggagcagacactgccccccccacccaggctttttaagactgtgctttgtgtagattaaaaagacgaaggaaaaaagaataaactttttccaaacaagatgtccatgtgcattctttaagatcctgtgtgtgcttaaaacgatcctgtaaaaaagccctctccataattttgaacctctcctttttctaaagacttttataggcatttttttttcttcttctcagcatgtgaaccaatgtgtaactcaaatagatgttactttgctgtttacttagattgttttaaaaggctagctgtgtggaggaatgaggaaggaagggaggcgggagtggctggagtttttttttttctctgttgacctaatgaatgcagttcttaaaaaataataaatatttatatgtggtcttaatttttaatgagtctcataaactggctggtatagaaaagtgtatgaaaagccatatatattaaactatagttattataaatacatgcatatgtacactagaatgttttatgaggaagggaacttactagtcttgttcactctttgttttcccagtgtctagaacagtgcctgacatacaactggtactcagtaaatatttgttgagtgaacaaaatgaatgtaaattgacagcattgcctagtgggggtaccattagactagaattcagaaaacttggagtctggttccatcactgccattaatcaagaatatattgttgctgaaatcacataacttctttgctcctctgttttttataaaaaactgggactagcccagctattcaggagtctgtggtggaaggatgacttgagcccaggagtttgaggctgtagtgggctacgattgtgcctgtgaatagccactgcactccagcctgggcaacatagtgagaccctgtctcttaaaggaataataggggctgggtgcggtggctcacacctgtaatcctagcactttgggaggctgagggggtggatccagaccagcctggccaacatggtgaaaccccatctctctaactaaaaatacaaaaattagccgggcgtggtggtgcatgcctgtaatcccagctactcaggaggctgaggcaggagaatcgcttgaatccaggaggcagaggttacagtgagcactccagcctgggtgacggtgcaagactctgtctcaaaaacaaaaaacaaaaagaggaataatagtatctgctctccttgccttttgtgggtttttttgatgattaaatgatatctgagggatacaaaaatgctttggaaactacagggtgctttacagactgtgtgtgtgagtgtgtgtgtgtgtgtgtgtgtgtgtgtgtgtgtgtgtgtgtacagaaaatcctttatctctttgcttctcaatttcttttcttaggaaaatcagattatttaaatcccattatgcacagctctcctctgttcttactaagcctctgtattccattacctccagtaaatcagtaaaaggtggtgagtcaggctgtagtggaaagcggggtctgctgttttctcatgtccatgttactctgtgggactcagaaatcttgcttacatgtctcatgaactttcttacctgtttgaactatacaggctataacatatgacttagagtcttttagttatgaccactcttaagattgatgactaagttgaagtatttattagttgttattatggtggattgataatcatgcattttaacatagtaaactaaagtctgtgtcgtagaattagctataatttactttttaggctggatgaggttactgatgcttgtaatcccagcacatcgaaaggctgaggtgggaggattgtttgagtccaggagttcaagacaggcctgggcaacatagggagaccctgtctctattatcataaataaaaacaaatttttttaaacaagtgtatatatgcatatgcttatgtgttgtaataataatatgtcccagagttgcacatctggaagagaagaagatagcaactgaaaagaaaatagaatggtattgacaaagagaaaagatggcgtcattaggacaattactttttatttttggaacaactcgaggctttacacccattcttttcccacatttattttttctatcagaattcttaaatctaagaaacaaataatatggaggttctttatattaacacattgctttaaattaggaagaaaactgtgtataggctgcagcagactttaaaagcattgtaagactttagatttggaaatcaactttaataacatggaaactttagatttaagagatcatttaatacagctactttgatttggcttttaagagaactgaggcccaggtagcccagaccaaggatcttttgcaaggtcgtgctactgggttctttagcgtcaagactgtaacctacatctttaggttcctaaatttttatcatgccttcttgttacctaactgttgattgttgaactttcttttttcttttttgagacagggtcttgctctgttgcacaggctggagtgcagtggcgcagtcatggctcactgcagcctgaaacttgagctcaagcaatcctcccatgtcagcctctcaagtagctgggactactggcatgtgccatcacacctggataatttttaaaaattatttgtagacacagggtctccctgtgttgtgtgggctggtctcaaactactgggctcaagctgtcctcctgcctcagcctcacaaagtgctgggatttgaattttcttaaacctaaatcaatattataggcctcaccttaggagaactttccaaaatattgttagtgttgaccaccttagcattacatttgctaacgacagtcatccaggtttactgaaccaggaaaccaactttcaggttaataagacagtttcgtctatgtgccatccttatccttgtctggacatatccatagagcacgcattttaaatctgaaagaatatatgtagtctcccctaccccagctttttttaagtagcaagggctattgaaaaaaatcagaaccctccgcttacgctcgcatacatgtagcttaaaatatatgttgcttattgaaagcattgtttaagttgaactcacgagatatactacatcatgtaatatgtctgcatttgtccatgcattcttttcggaaacctgatcttacttatgtctgcatttaacagataggctaggttaagttatgttaaaacatgttgtactgaggttggattcaccgtgtcacagcctggctttcttccttgattagctttaatcaaactctctgcattccgtgaccttaataaagctatttttcctgacaactgaagactgtcttaacaagcatagttcatctgtgctgaaactaaggctgagttaagatggggtttaggtcctcattaaagtccacagcatggagtgtaagaagaaatgatgaaatggtgctccctgaaacatctcttctttaaatttaattagacaaattatacgcaaactagtagatgccctgggaaggcaatcaacattagggctaataaaaagcttgagtagtataaaaaggctgggggaggtgctgtggagcctttctaacgcctatgagaggcaaattaaaaccaattgcgaaacatggaaactggatgaatttcaatattgatttagaaattaattttattatgttgttctaaatataaaaataaaggctatacttattaatcttccagaatttgacatgttaacacctatgcacaaagcattttatggatctttatatgctgggagacacaattatgggctgacttggaagttttggcagacctgggttcaaattctagcaacttcccctactagtttttttgtttgggggggttttttcggtgcacattacttcacctttgtgaaatccaatttcatcatctataaaatgagataaataattctattcctgaagaggctttataagaattttagaaaattaaaatagtaagtatagaacacttggtacaatgcctggcacataataggtgttcagaaataggtaccccatatttagaaggaacttccactgagttaagagtggtttcaagcaaactgtcctataaatatgtgagaattggattatgaatgtaaatattgtgtgcgtaatcttatggatcaagataagtttaagggaaaatgctagcggacagaaacttatagcttttggaagaaaaggtgactcaaacataagaagcaaattatttgaagcccacagtagccaaatggagagagtaggttgaaacatttgttaagtgctgcatgccaaacatcctgtataccttaccatctcatttaatattgataacaactccacaaggtagttattactgacctaattttgcagataaggaaaaaagagattcagaaaggctacgtgaattgcattttagcatagaagagtcaggactggaactcagtgttggcctagttcttgggggtggttggatggcaaactagtgcaggtatgttcataacttgtaagatcaaatttgtcatataaattacggggatatgtaatctctctcccttctggctcttttcatccttgggtgagttctaaataaaactattttgtgttatttttttaaccctcattccattgctttcagactctggttctcaaccttggctgcccatttagaatcacctggagtgggatctgggcgttagcattttttaaagctcctctagtgattccaggtaggcaacctgcactaaagacctctgctttaaaatctctctacctcaggcgtaggtgttttcattgcccatagtattaagcctagcttttagcagagatttgccaaggttgattatgatcctcttgcttgtttggaagaagaaatatggaagctgtgaaatcttttccagttgtgatagatgttgtttatgcattaattagcatgtaaaaattaaacactgtctattcttaatgttagcacattttctttctctctctctctctctcccacctctttttttttttttctattgaaggaggccaaattagatggagtgaagagaaaagtgattatggtaacttttcccttcagagaagtcaagagcaagagtatttttttccaatttcttagtaaaacaaaaaatattttctttccttttttcttttttgtttttgagacatggtctttctctgtcacccatgctggagtacattggtgagataatggctcgctgcagccttgacctcccaggctcaattgatcctcccacctcagcctcctaggtagctgggactacaggcacacgccaccacgtagggctaatttttgtattttttgtaaagatagggtctcaccatgttgcccaggctggttgcaaaccaccagactcaagtgatgctcctgccttagcttcccaaagtattggaattacaggcatgagccactgctctggccaaagttattttcaaaatacagtggttttaccccaccacccttagaggtagaaagaatctttgaccccaccacccttagaggtagaaagaatctttgttgccggacagatttgtggtaaatcctggtttctcactttctgataaagaattagtcattttatttgtttgtttgtttatttatttatttatttatttatttattattgagacaagatcttactctgtttcccaggctggagtgcggtggtacaatctcagctcactgcaacctccgcttcctgggttccagaaatctccctcctcagcctcccaagtagctgggattacaggcatgtgctactgcactcagactaattttttgtatctttagtagagacatggtttcaccatgttggccatgctggtctcgaactcctggcctcaagtcgtccgcccacctcggcctcccaaagtgctactattacgggtgtgagccaccgtgcctggctagaattagtcattttaaattcactggggctgggcgcagtggctcatgcctgtaaccccagcactttgggaggccgaggtaggcagatcacttgaagccaggagatcgagaccagcctggccaacatggtgaaacctcatctctgctaaaaatacaaaaattaactgggtgcctgtaatcccagctacttgggagactgaagcacaagaactgcttgaacccgggaggcggaggttgcagtgagctaagatcacgtcactgcactccagcctgggcaacagagcaagactgtctcaaacaaaacaaaagaacaaaactctctgggcttgatttcttaatctgtaaaacagaaataattcttaacacatttggttactctgaggataaaagtggaggaaaaaacatgcagaggatagtccggaactccccatgtagatcccattattaggtaactgaggtacaagtatcttaggctactggtccgggcaggctttgctgaggggctccgtgcagcttgctggtgcagccgagcaaatgggcctgtagccgactcttaatccaggttggtgctattcaaagagatcatctttcacccgagggatttctgggcatctattttgcggatcagaaagtagagaaagaaggtaactttgccgaaagctagtctggggagttagtagctgatacagatcagcatttcctaactatgagatttcataatattctctcttgtctcgattctgagtcactggtgcctgctgtggtggcattgttcatgaacatgtacagttattgggaagtgatcttgtctttcctcctgccttcaggcactgctacctaaattacaccccgacagatgtattcccattcttctttaaaagactatgtcatgagctgaactattaagttttaaagttgataagcatcaggctaagcatatttttcctgccatctcccacggaggtataacattgttttctatacttagggaatttaccaaaaaaaaaaaaaaaaaaaaaaaagttggtatctgctaatgggtcaaattagcaggatgttttgaaaactcagtggaagaatagctcttcctgcagatgcatgacctggtagaaatccagacattgggctccaccaaactcgaatgatacccaataaatgatgagaggaatatccaaagagttaaatgccatgagaccactcaccccctaaactctaaatccttgtatgaccctgagacaggcaggcagtagggctgcaaggctgagataagtactgaaaattggcccatatacattttgttttaacatagctccttcctttacacttttctgtacccctggcctgaaggctctacagcttgttacatactgatagctaagtaaatgcaatcaacattccatgctactgcctgcagaaaaaccgaaattgtttactgcctccaggatgttggtaaatatctggctgtattttttttttttttggcgggcgggggcggggggaggcaatgggtaggagaaagctagtatacagtgtcccaatttacattataaaatgcaaattttgtactccagaataagaaacaacttagagtagacctgtattgttccaaaactaatgagaaattatcatgttttctatgtgtagaaaagttttctcttcgcaatggctttacatattttctgtagggaaaaattctatttataaaatagcctgggatatggagaactcagtgataaaaggggcaagaacattttcagattgttttaccctgctggaatgtagcatgggaaagctccttccaaaaggctattacctctgggcattctggcacagttggggagtgaattggtaagataaaaatgggacgaaaatccctattttctgttaaatacaaacaggctcagaatggggcatcctgcatttaggattagaaacttcattatacaaaagcagggtggagaaaccctaatttgacagctaacccaagagtgtatggtgaccacaagattaacaggggccagcagtgtgacattgccattcaaaaagctggtgctgtagttgggctgtggtctaaccacagctgggtttttttttttttttttttttttgcccagttttgggcacagaatgctaagaggaacgccaacagaatggagactcgatgccaatgaattgggaaatcatattatgtgacgggcagttgaagaaggcatgtctgtaaaattgaagaagagatttcttagaatgacctcagtaacaagcttaaatatttaagtgtctggtgaaagtaggggtgggatagtctctgatgtgctacaagatcgaagaaggagttaagtccttctctagagcctcaaacccctgctcagcatgaaaaaaacaacagaaacccaagttaacatctccttgcaatatctgatctgtttttccaatacatctgctcatcttgtttcaaaacaagtagctgtcaccattcttaaccctgtcgtccaaaccagaaaccgggcatcatctttgactggtcccctttactcagggggaaaaaaaaccatgtcttttaaagtcagcgcctataatactggtctttggtttatctccaataactcgattgttaacagcccttgaaggggaggcaatactgttaaacttgataatttctaaagagttttgagctatttagcacgaagtgatgccaagaaaaaggaatactaacattactcacagcagagggaaaaattttatatcctttctgaaggccaaggttaagttctgtgtgactcagcacattgactttctatatgaccctaaatcccttctatttcctgatctacttgtcttgacctgtttcatttccacaccaaaatagtttcattaacacagcgatcatgctcaggagatagtggctaactgatgtaattaactgacatgtcaaaggctattggtttattgcatatgcaactgtctttcctggtgggaagatacagtttctgctgacataataggtatgcaaacatgccaaattgcccaataatctgcccccgtgatggtgaggtgtttgcggccattctacttacaggaacagaatggcggatctgttactatgttctcctaaaatgcagctggccaaaggtgctaattggtaaacagttaaaatagaaagaagagaaggcaattcagttttgggccttagtgagttttttttccttttctttccttaaaaaaaaaaaattgtgcttttggcatgctaatgcatgcatttagtctctgcaagaaatttccatttaagaaagaatttaaaaacatgaagtgctcaatccatatctcctaaacaactaaaaagactgcaatttcaaatgagaaattatgttgcaaagaagaaaaaagttgtttattatggctcaaaattttaatcacccaagggctgtaaagttaaaaatagacaattctgccttctgtttatggtaaacttggctgagtcccggcaaatttcaaagctgaacatactgtatgttatttttgcttaattttagattccacattttaaaattatttcttacaagaagcatatttcaggatataaacttagcctgaagaacagtattcttgatttttgcccatattgaaactcctttgaaaatagtaaactatggttttgggattttcctattcccaagagtccaaatgggtacctttctaagtcttttacattatgaatgaacacaggattatgaaattgtaaaggttactttctgctctctaattcctttactcgtaattttagttttcttaacggtataacttgatgcaaatatatacacagtagatactaactttcactgaagtgttttcgggagggaggggcactttacaagatgtgttgcctttagtttttccggtaaggagacaggaagacacagacacaggctcttagggcacatggaaagcgcctgcccctgtgccaagaacttaagagagagccggggatggaccctccttgctgtggctcctgaacagtgcagcctctcttctgatgcactcaccctggcgaggagaaccgcttgtgtggcgactgcttggcccaagagcgagtaggattgttgactcaactctcttcgtgtctcctcagagaggaggaacacctggcttcacctgtttacataactcttgttgattcttgtccctaagctcttccagaatgctcttttgggcttttcctcaaaaggtttttagaagaacaagctttttggggtggcaagaaatttaggatggagatttttgtttttaacctattagtcagcgtggcatcagagaaccacatgtgccccacagtcagtggcatgctcagtaaatatttgttgaatattatttaagtgaatgactgtttgctgaagaacaagatttctctgatgaccttgacaaacgtatgtttgtgattaagttaatcatagctaccacttagaacttcttactcactagacatgtagctgaacacttcatatgtcattctgctttttgtttttttaaagacagggtccctcccactctgtcacccaggctggagtatagtggtgcagtctcagctcattgcaacctctgacccccaggttcaagcagtcctcccacctcagcctcccaggtaactggggctacaggtgtctgccaccacacctggttaatttttgtatttttttgtacagatggggtttcaccatgttgcccaggctggtctagaacttctggactcaagtgatctgcccaccttggcctcccaaagtgctaggattacaggcatgagccactgtgccttgccttcatatgttatttctgatccactaggtttggaacctatcccaggacacctggccatatagagtagctatatcgagtctatattcagcaagtgcagggtaagctctgattccatggtccttccaatatgccataccaccgaggttgagaaaggtggtgttaacagtacccatacgttgacataaggcctctgagaggccaaaggatatgccacagtattctttaaggtgcttaagcccttaatcatgaaatgttttcctaggccacagtaagaatctacttagtttacacacaattctaataaatccggttatctgtttttcaaatacaaagcagattgattcattcagcaaatattttctgaatacctattatgtgccaagtagattgttctagatacagtgaacaaaaaagaatccttgctctgacagaggtgatgttgcagattaatagatcagtggttctcaaaagtgtagttcctggatcagtggcattagcataacatggggacttgttagcagtgcaaatgttggtccccacccccgacttactcagtgagaagctctaggggtggggcctgattttaaacaagccctgtagatgattatgatgtatgtgaaagtgtgagaaccagtattctagaagattttaaacaatttgtgttcctatggcagatagctctctggagaactttgtctcctgattcattcccagactaccgtgtgtgtgtacatgtgagtgttggggtcttaccttataacggcatttagtgattggcaaagctcagatgctgggcctctatggggcagaggcacttggacatttgtacctaaggatgtgggccctggagttacatgtacctgaattcagattcttactttgccaagcacagccacaagaacttgggagagttaggaaaactctctaagccttagtttcttcattgtgcaaatgaggttgacagtaataggaccatacctccatttgtagcatggctacttggtacaaagaaaatgtccagtaactagtaacaattgcttttctctctccaggatccagcacctggcctggcacagggtacatgctcagagaacaagtctttgaaagaatgggtagatgtttattttcctttgtattagccattagctcaaggtctgcagctacttaattccaacctgggtccatttttagcagaagaaaaaagaataatgggactcagcatcaaggcgcacctgacacagagtcctcttggaaatgtgtgacctgcctcagtttagccactgcttttacttcatcctcatcagtcagagtatgacattgccttcccctttacctcttaattttggaatatttcaagtgcctctaaaattttatttaattaaggggcttccaaatctgcttgtagatattttattcttgaaatgcttgtggcattaatagtaaatcagaatcagacctccacctattttgtgccatttcagcactaagccaaggagaaaaattattgaggaaattaatgcttcccttaagcacagtaggaacacgaagctaacatactgccgtataacctgatttcactggtattctttctgaaatttttgtttttctatttctattgcatattggacttcatggctaaaacaaagtgcaattatgaggaggatgttttctcaaaatctgtagggtctggttggtcacataacctttcagaagaaacattatctactggatgacttagatgttattcaccaatagattatcaaggtttatctccagatgttcattaattcactaagtattaattgagtatctactatgtgccaagcatcgtcctaggtgctaaagatatagcagtgaatgaatgggacaaaagtctctgccctcttggtatatacttagttactttctttttcacacatgggcatgtgtgtaggtgtctctggagtaatgcgttatatgcaggtgttgagcctagggtggtgttgggtgcatcatgggcactcacatgttaatttcctgcactgtagatgattgctgattctcagtgatataatccagtcaaaccatttggcgttcttctgctttaaattttattggtgaggtttaactcttcattaatgaacgctgtcacattttctctcttctctgacatgtcctggtgccctgggtttgtggggtcaagtcactgccgatttaattcaactcttctttgtatgactacaagtcctgtgttttagtttcctattgctgctgtaaaaaatcaacatgaacttaatggtttacagtaacacagatctattccctgataggtctggaggtggggagtctcaaatccagtgttactgggctgaaatgaaggtgttccgaggactggttccttctgtaggctccaggggagaacctgttccttgggccttccagcatctagaggctggctcttcactgcatcactgcatttgagctccgcttccttctcctggacctttgaccctcctgcctcccacttaaggagccttccagttgcatcattgggcctgcctgaataatccagggtaatctgtctacctcaagatcttcaacttgatcacagctgcagagtcccttttgttgtattcatgcattctggacattaggatatagacatcttggtggttggtcattgttcggccgatcataccttgtgagaaattccagtgtccctgggctgagctgctaaggagcaggttttattgagcagtctttcccattctatgaaacccaacccaggagaaaacgctctaaaatgcaaatgttgctaacttggcagagcctaattatatgtgcacaactacctaaaattttcttaataattgctctctgttccacaagacttggctcaaaaacccctcctccaaggagccttcctgaattttcctgggcttgtatagtactctgtgtttgtgattctgtgtcacgctctgtgtaagtgactccatgatcaaagctttcctgttgtaattgtgtggatttacttgttgcccactgtccccataccctccacccccacatggtgtgctttctccagaaagggactacttctgctgaccacacagaagacgtgtgtaaagtctgtgtatcaatgaatggattctcatctttcatagttttttttttaaatagttttatgtgtgtttaacttaatttcacttaaaaagatatttaccagaagctgaaagtagggtgtgatgaggttgggttcaggaaggactggtatcacatggcttccctaagttgtatattacattgttaggacacctgacagagctgtggattagtgaatcttacggatggctcttttcagttgaatataattctgaagctctgcaccattcttcccactgtgttgctgttaatctaccataaaccaggtagattctgcatagttggaagtgatggaaatcaaggtgaatgcctgattctttaaatctttttttttttttgagatggcgtcttgctctgttgcccaggctggcatccattggtgcaatcttggttcactgcaacctccgcctcctgagttcaagcaattctcgtgcctcagcctcctgagtagctggaattacaggtgggcaccaccatgcctggctaatttttgtatttttagtagagacgaggtttcaccacgttggccaggttggtctcaaactcctgacctcaagtgatctgcccgcctcggcctcccgaagtgctaggattacaggtgtgagccactgcgcctgacctgaatctttaaattcttaaaatcagttttagtcaccaaagaagatactctgtagcttaataactttgagttactgtaacggaatcaagtcactggtattgagacatttttatttaaaaattttaaattagaatcttactatgtggaaaaatacggtcattgttggaaaatcattttgcctctttttaacagcattcaggcagtttttttttccctttgaaaatagaccttggtctgtgttgttggaaagcatgtaattttcatttgttttttttcacctagtagtgcttaatgataccatgtgaatttttatagtcccagctgcactgaagtgtgtgccctgaaacttcggttggattaagaaaagtagcttggtgtgagggctgaaattggtgaaatgggagaacacagggttgcatctatatatattgcaattaatattgacgagtgggcagaagtccaacattatcctagggggttggctaatgttctttgtacaccaatgcaagtgagtcttttccctccaggtgtgaatagtttaatttagtaggtcgattagtagaagcaaggggtgttttcttgtattccagtttacattatacactcaacattaactagctgtttaaggtacagtgcattgttgagtagttgtggtacaggtatcctgagacgttgctaacccatcttggtatctccagggcctggcatctaatgtagtaggtactcattagcatttgcaacatgaataggagaatgaatgagtggttgttgtggcaaagtctcttaaaaatcctggtccctgcgtacctctgtagccttctcatctccccaccttctagcaataatattctatttgtagcttgttaaatactccacattctttccggcctttggacttttgtacatttcattccctctgactctcacaccaccttccctgtcccctatcccctttgtctggctaattcccgctggttctttatgacttagcaccttctagaagacgttttaggaggcatcatagtgggtattttgttgaaggcctggtttgtttttcatatctctatgataacatatctctttgggtaacaacagagagctgctgactagtggcaccgttgaaagctgcatatctgaagcttcttttcaggagaatgtggatcatttcaggtgcctgcatcatttgcatgtacatcttccaaactctattggtactttccatttagatatgggcagaacatgatgctacagtaactgaaacagaagttaagttagcagcagattctcttccatttatagcatcagtatcagggtaaaatgggaagatgaaggaaaactattgatgaattacctttggtacagctgatactaaagtgggtaaacaggcaaaaagaagttgggaaattgaaccattctctttcttttctttttttcaaaattagagacagggtcttaatttgtcacccaggctggagtgcaatggcacgatcctagctcactacagcctcgaactcctgggcttaagggatcctcctgccccagccgcatgagtagcaagtgcatgccaccatgcctggttaatttctttcttttctttttctttctttctttttttttttttttttggatgagatatgggtctaattatgttgaccaggctggtctcgaactcctggcctcaagcagtcttctcaccctaggcccccagaatgctgggattacaggctttagcaaccacacccagcctgaaccatttcctttctgatttaacttaggaaagtttgctgcatagtaggagctcagctaacatttgctgaggatgaaaaaaataaatgaaccaagtttgttttgtttgcatctttttccttttgctttacaataatatattttttaaaattccctgtcttttctactacacttcttttggccttcatagctctagccccagactatacttagtgcttttgctaagactgactcatcttgtttgattgctttagtgatataagattcttgtatccataggaatggtgtgagactgtatgcctttcatgtttgcaaaaatgtaaaccagaagagccagttattggtaccagtaccaactaattcctcagagctatagggcagtattaaattactaagccagtgtggaaacagcatgatctaatggaaagctaattagcctttgtgtcagatgggtgtgattcaaatcttgtctgtactgctgatgggctgtgtgactttgggcaagtagcttaacttctctgagttcccctgtctctgttttttcatttgtaaaatggagtggaggggacaatattaacttgcaggatggcttgatgatgagaaatgataaatgtcttagtctatattagatcttcagtaaatggtagttgttttgaccactgttactgcaatgagccaaggtggctataagcccttcagtgtttcagtaaggacaagcttacaggtaaccaccaagatcagggcagaacagctgatttaggtctaaacaggttccatcgtgtgtcttcaaaaaggttttcctttttttcctctggagaaaattcagactggtttaagaaggaaactgagagcctcttccctccctatgttctgagtgtttcagagatggccagaaatggatactagttactaagcaagacctttaaaaaatacacgttacaaggcaggttggtatgaaggaaagagcactgacccgtgagttattctcgcggggccaggctctgctccactcagctctgtgttctctgccaagtccctttagatcaatgtgtcgcatgtccccccattgtgagttgagtacattggaccaaaggattatagtttgttttcttcccaggcaagtgcctcctcctgatggggagttagtatgatgtgggtggccccagtaggactgggctggtcttactgttctaagaagtgttagcagaaaaatggctaggcattggagtaaccctgtgatttgacattttggggcatcctttcatggtacgatacacctggccaaaagtctcccagctcagaaattctataactagaaatgctttgaataaatatatactgagaaggtattttggggggaaattttaaaattcttatctgacttggctagagcaactgcttacgacactggacttcttaggggtatcgataatggttgtctttgaatggggagtggatttctcagcttcctgggaacagcaacaaaattcccccaacaaaccccagggtgtctgaagcgcctgctttcttctcaaagagcccgatcgaatactcttctgtgggctcaagagctatcaacagtattgaacagttagactagaaggatgggttgagaacagttgctccctcaaggcttggaaattaacaaagaccatattagtaagaatggggagggaggtgggaggtgaagagaatgagggctgggaggagcaattcggaagtggagagggtgattggaggggtttgtttcccagacagttttcaaagaagagggatttgtgtagtatgccatgggactgaagatgcagtgcaagaccagttgatgttcttcttttaatcaaccaattaatttctctatcatgtttcttttaggctaacgaagtgtcttctttcctttatcatggccattgatagcaagagcttaagggaatcttgcctccctgggctcaggataggctggagagaaggacacacataagaggaaattgacattttgcagtttttgttgttgttgtttgtttgtttgtttttttgagacagtctccactccgttgcccaggctggagtccagtggcacgatctcagctcactgcaacctctgcctcccaggttcaagtgattttcattcctcagcctcccaagtagctgggactacaggcttgcaccaccgtgcctggctaatacagcttttttttttttttcttaattttatcataggtaagggaagacgatccaatgtgcagagaaggctcaggttttcattttagtctgcgggtgattgatttctttctttcaaggggctggttgaggaggtcagagtcttagaaagggagaagaaatcagggaaaaggagaaaagaaggaatgagatttatgaccctctggatcccagattttatgtcgcgtaaccattcccaatactggaagttcatgacaccctgagaaacagccctggaactcagagcagtgatctgcatgcaaaggcaaaattaaatagtccagcaactgctttgaccgagagacacacatagtactattctgggtcctgagtgctgcttccctttcatttctcccctaggcacagattccactggctcacagagtgatgagttagaccacccagggccacttatgttatactgagggcggatgctgatagtgcttatagaggaattatttcaacaatgagacttttccattattctttctgcaatcaccctctatactcagaatgtggaaaccttggcatctctcacttaagaacactgaattcatggtgttgctcagagagtcctgtcctggttccataacactgtgataataactgaagatctttaaaaatgtatgtatcttccatttttattccatatggccccttaggtaacatgacccaatggggccattaaatgaccctgcctacacttggattactcagtacaaagcaaatttatggttgtttattctctcctcctatcagctattagtgcctaatcatatggtctatcgatcatgagattaatcgcctgcccaaagaggcagcaggtcttgtggaatgctgcactgcgccagactgaacttcaaccttttatacaaactggaggagtcaaaatcatcattcactgcctgaaatccttgcaccctgggcctcctgcaccccaggaggtaaatccctgctttttcaaacagtgtactttgcacttcctttccttgtgtaaaactttacctcattgattcaggcaggcacttgtaaataaaatcctttccaaggcatcctataaataatgatctaagctgaaaatatgtgggctttattatacaaagccccatagtgctgccataattaaaggtctgtcagtatttctattataaattctcattttagaagatttatcactgggctattaaagttttctctaagactttccaagagtatcatgatctaaggccttttttttctttctgtggaatgtgttgctttgaagatataaaaaataaagtccagaaacattatcacataggagtacacacatgcagagattggacactttaaaatttgagctctgcctccactaaagtggcttctgtttgcctcttgtgttctcattgcatttatgagaacagagaatcattgtagggctaatactgtattgtaatatttgtttcctggtctgtgtcttttactctgaggagagagagggcagggagttaaatcatttgtctttctggccctggttccaccagagggccttggcaatataagcactgggtttgttcagtaaatgagccccagggtgagagtcaggaaattttcttcctagtcttcatctagtcattaaaggtgaggagtgaattcaggcagtgaatttaggcaagtccctttactttcctgaaaacaagttttctgatcaatgaaacgagtgtgttgagttcagggctagtaaatctgtttttggtgggttgaatactgccggcacagtgttttcaaacacttgaattggaatgtctttagatggaatctgtgccttctagtttgccataatccccactgttccctattatattatgttgtatcagcagcctgcttctatcatttgcctgcagagtctataagcatttatgattccttgtaattattgatcatgtggtcttttgttgctatactaagggtctaaatctgattcaggttagccgttgatgcctttgactgtaactgtaattctctaactttcaacccttttatcatcaaggacctcaactattattttttgttccatatttgaaaacttttggtgttccagacacactgcattggttaataactaattttcccgttgtaaaaacagacacgtgtaactgaacacacaaatgagccatcaacagtatgaatataaaagtgtttgtgcaatgagttggttgacgtttcagctagcttgttcagttgtttcatgggtaagtgtatagtttttgtttgaagttttgatatatgaaaaatagttccgaggtcttctgccttattagacatgtgatagacaaaggattctaggtgagaacttagtttattcttttatgagttgctgaactgccctggtcattagaacatcaagtaagttgtttatccacatgcagttcatgtcttttcagttgtctccttattggtcagcttagagagggctctacaaaacctggcttttacattcagtgagctgaaaagagcttcctatatgagtttacccaaaggcccttgttacattttctccctttagtcaagagtactttggaattttacattttctccctttagtcaagagcactttggaatttgttaaaaggattgggagacaatttgaaaacttggctctccagttaagaagaatcattttttacactttaactcagactgttggtgaatattgtaaattgacaatttaaaaacacacatttgttttattttattttattttttatttatttttgaggtggagtctcacaccgtctcccaggcttgagtgcgtggtgcgatcttggctcactgcaaccaagtgagccttggctcaccgcctcccagattctcctacctcagccttccgagtagctgagattacaggcatgcaccaccatgcccagctaatttctgtatttttagtagagacagggttttgttgtgttgggcaggctggtctcaaactcctgaccttaggtgatccgcccgccttggcctcccaaagtgctgggattataggcatgagccaccacacccggccttattttatttttgagacagggtcttactctgtcacccagactggagtgcagtgacacgatattggctcactgcagccctcgccttctgggctcaagtgatcctcccacctcagcctcctgagtaactgggattacaggcacacgccaccctgcctggctaatttttttgtatttttaatagagatgggttttgccatgttgcccagactggtattgaactcctgggctcaagccatccacctgcctcaccctccccaagcgttgagactacaggcagtgagccactgcatctggccaaacatacatttaaatagagcagatgaaagatctatagtgtagaagtaatctgcatataaaccagtcttaaattgagacgtgacctatgactgttaaagcagtccacatcacacaaaaataaagggcttggaagatagcagcctggtttaaccaggttagatataatttaacaggaagagatagtgtctacattgttgctaaaagcttaggctctggggttcctaatttgggtttaattctgtcttggttacttgttaattctgtcaccttggagtggttccttaaatctccctaggccttggtttcctcatttgtaaaatggggataataatggcttaccgtgtggaataaattagagtaattcatacaaaggatttatcatcatattggttatagaagaaacaatgaatattcatgatcatttttatcaagaatataattgaaatatatttctgagcgttgaggtttttctcttaaagaaaagtgtaaaggtatactttcttaagactgctcatacatgctggatcacccatatacatttccaggaaattgtatgttctagcaattctatgttccaaatgtgctgctttcagttttttcgagaaacaaatgatgtttgactttaaaattctagagttggccgggcgcggtggctcacgcctgtaatcccagcactttgggaggccgaggcgggtggatcatgaggtcaggagatcgagaccatcctggctaacaaggtgaaaccccgtctctactaaaaatacaaaaaattagccgggcgcggtggtgggtgcctgtagtcccagctactcaggaggctgaggcaggaggatggcgtgaacccgggaagcggagcttgcagtgagccgagattgcgccactgcagtccgcagtccggcctgggcgacagagcgagactccatctcaaaaaaaaaaaaaaaaaatctagagttgaaatttttctcttacatttccttttccctctagatcaatcccaattaaagtttcattgcaaaagtttcacaaactcatattggcattaattattattggtgtgctggtgaaagtcctaaagtgagttcattaagaattaaaaaccttggctgggcgcggtggctcacgcctgtaatcgcagcactttgggaggccgaggtggatggatcacctgaggtcaggagttcgagaccagcctgaccaaacatggtgaaatcccgtcactactaaaaatgcaaaaattagctcggcgttgcgtgcgcctgtagtcccagctactcggaggctgtgacaggagaactgtttgaacccgggaggcggaggttgcagtgagctgagatcatgccattgcgctccagcctgggcgacagagcgagactgtctccaaaataaaaagaattaaaacccttgagaaaactttaaaccctcctggactcatagagctggaggggacctaagaggttatctcctctaagccccattttccagataaggaaagtgtattttccaaggtaaaataagttttcaacagtgaatatccttcataatggctttttaatttgtactgtcactggagtcagccctcatttgccatgttatgattatgttcttcttgtgggacttgtatgtatttattagagaccattgagacgtagcactgggcattacttttgtggcaaaggcaccagggcagtaatcattattaatggatttcattatttgggagagcattttactgactatagagaattcattgcattgatctattgtgccacagttttattataccgggtagtttaaaatgatattctctaaactgttaggctgaaaaattgtccagtgttggcagttatcccatcagtaagacattccttttactaccgaaaatacatagttctgtcgaaagagaccttttgactggtccccagtgccctgactgtgtttaaatccctcactagtgaaataggaggattactactgccatcattgttctaaaacaaacttccttttggaagataacagcagcggtaaatcagatgttgaagaaagtaccagcttaacttcactttgctttaaaagggtttcctctttaattgacaagtgtcatgtataatagggcatggcaactcacatagtaaaccttgtgtggggctgcctgctggggttggagttcttaatgaacatacaagtgaatacactgaggcaaaaaaattaaagctctccaactgtggggtattcattctgttcactgtggccagtgtggtgatcagtactggccacaccagtggccaaagagaactgcattcatcatgtggctgttctatagctgtgagctgtggtgactgttatttttcctagtgatagttttcagtgacagcatagattctggtatcatatccaaggaataaacaaacactgtttttggctttttgtttttttgtttttgacataaaaataataagctatttttggcatatgcagacttttcacaaagtgattgttttcttgagctctggactacttggtaacattcataagttccttcactttgtagctccctctttccttccctccactccctgcaaaagagagcagaactgatttttcagaggtgatgtttacaacagttcaacacactcgaatgagcacttagaataatgtcaatagaggaagaaaaaaaaggacatattattatcaaattaagtaatggatgggcagtgatattttatttattaaagcttgtctgagtaccattggaaacagagtatgttggttctgaagtgcacagattagaaaggaatgttgagtttggaaacgtggcagcctgcagcactgtgtatggtttaaattaaacctttttttggaaagcagaatagctgtaggccacatttaagggaaaagccacagcagagtgagctggctgtggtttttcttttactctgtaaccggcccactttcccttgttttaacacagaaaaagactttggactccttcagaccaaccacatagcttctctgctgaccacaaaaaggaagcttggcgtagaagccataggattaatacccactgtctcttaacccaacagagtgtgaaaactttcataagagatttctctgggcagactgacactgtggttggactttaaacattttaaatcaagcacaactttgaattgcattatgccacagtgctctgtaaattgttatgtgtgatcccactgttaaaagttatttacatgaatccccaggtttcagagggataaaccactaacagctttgtgtatcttataaagaaatacaaagagaattaaaggtatgcctatgacacattatctcagatagagtaggtagatcatagtcagattttattattcttaagcaaatggaggcaattggcttttggcagaaaagccttttcatctttgaaaataataggattaagattgtggattctgttaatcacttgatcagctttattaattaaccacatttttaaattagaaaaaaccctttttactagatgtgcatctttcttaataattttacattgcaggttttatttaatatactgatctactcaggtattataaatggttgtttctatgtcctgcacattaattttaataattggaatcctactaccctgatttactaatcatgcatttgtacaaagcaactctgaaatgaccaaaaataaccacaaaaaaaccttttgtgtttgtatttatatttactcattcagatgcctaggattaatatgttttacaagaaatcatttgaatttacatcttaccatgttgaattaatcagcttttcataagtgcactgtctcagtattctggtttctatttaacagagaatctcaatggaagagattgatttgaaaagttgaaggaaaaatcgtgcatacatgtttcaaaactgtggtcttacagtaaccacagagttaattcttggttgactttatgtcgcgagaggggttgatttgctgtcattagagaaattggtctgtataacacttcctgtatgtgaagaaatgcagttgtcatcatgcctagaccattaaagcagtatttaaatacttccagttgtgaggagccatgcatttattttggttattttcccaggtgtcttaggagcagctgttttgtgctttactgaacttaatagttgaagaatgtgggaaagaaatggtgtactttctgggtaaagtattttagccaccctggagtagttgcattgcatcttgatcttttttcatcttggtagaattatactgtaactaattgaatccattgatcactgtcttgttttttttccatcttcttctccgaggattcatttcataggggtctatacatcagtcaagaaaatagctaccgaggaattaccgagactagtaataaag

SEQ ID NO: 1690 - DNA, 563 bp, Homo sapiens
  full length sequence of bloodCirc_17014
aatttagcttgggttaaatcatataacatctgctttgaattggaagattgcaatgaaatttttattcagctttttagaactctcttctcagtgatcaacaatagccacaataagaaggtacaaatgcacatgctagatttgatgagttctatcatcatggaaggtgatggagttactcaagaattattggactccattcttattaacctcattcctgcacataagaacttaaataaacagtcctttgaccttgcaaaagtgctattgaaaagaacagtccagactattgaggcatgcattgctaattttttcaatcaagtcctggtgctgggaagatcatcagtaagtgatttgtcagaacatgtatttgatctgattcaggaactttttgctatagatcctcatttattattatccgtcatgccacagcttgaattcaaactaaagagcaatgatggagaagagcgattagctgttgttcgacttctagctaaattgtttggctccaaagattctgatttggcaacacagaatcgtcctctttggcaatgttttcttggacg

SEQ ID NO: 1691 - DNA, 556 bp, Homo sapiens
  full length sequence of bloodCirc_13755
tttaatacaattttttagtaaaatgaagaaatggatggacatgtcaaatctaccacaagaatttcgtgaacgtatagaaaggctagagagaaattttgaggtgtctactgtaatattcaaaaaatatgagccaatttttttagatatatttcaaaatccatatgaagaaccaccaaagttaccacgaagccggaagcagaggaggattccttgcagtgttaaggatctgtttaatttctgttggacactttttgtttatactaagggtaattttcggatgattggggatgacttagtaaactcttatcatttacttctatgctgcttggatctgatttttgccaatgcgattatgtgcccaaatagacaagacttgctaaatccatcatttaaaggtttaccatctgattttcatactgctgactttacggcttctgaagagccaccctgcatcattgctgtactgtgtgaactgcatgatggacttctcgtagaagcaaaaggaataaaggagcactactttaagccatatatttcaaaactctttgacaggaag

SEQ ID NO: 1692 - DNA, 510 bp, Homo sapiens
  full length sequence of bloodCirc_07121
agagcacgttttcaatatcataggagcatttgatattccacgctttgtgtacaattcagaaagaaaaaaatttcttcctctgttaatgaccaaccaccctgcaccaaatttatttggaacaccaagagataaagcagagatgtttcgtgagcgatataccattttgcaccagaggacccacaggcatgaattatttactcctccggtgataggttctcaccctgatgaaagcggaagcaaattccagcttaaaacaatagaaaccttattgggtagtacaaccaaaatcggagatgcgattgttcttggaatgataacgcagttaaaagagggaaaattttttctggaagatcctactggaacagtccaactagaccttagtaaagctcagttccatagtggtttatacacagaggcatgctttgtcttagcagaaggttggtttgaagatcaagtgtttcatgtcaatgcctttggatttccacccactgagccctctagtactactag

SEQ ID NO: 1693 - DNA, 226 bp, Homo sapiens
  full length sequence of bloodCirc_20223
aataatcatgggccagactgggaagaaatctgagaagggaccagtttgttggcggaagcgtgtaaaatcagagtacatgcgactgagacagctcaagaggttcagacgagctgatgaagtaaagagtatgtttagttccaatcgtcagaaaattttggaaagaacggaaatcttaaaccaagaatggaaacagcgaaggatacagcctgtgcacatcctgacttct

SEQ ID NO: 1694 - DNA, 506 bp, Homo sapiens
  full length sequence of bloodCirc_00933
gacttgcaattgtgaccaaatatattacaaagggctggaaagaagttcatgaattgtataaagaaaaagcactctctgtggagactgaaaaattattaaagtatctggaggctgtagagaaagtgaagcgcacaagagatgagctagaagtcattcatctaatagaagaacatagattagttagagaacatcttttaacaaatcacttaaagtctaaagaggtatggaaggctttgttacaagaaatgccgcttactgcattactaaggaatctaggaaagatgactgctaattcagtacttgaaccaggaaattcagaagtatctttagtatgtgaaaaactgtgtaatgaaaaactattaaaaaaggctcgtatacatccatttcatattttgatcgcattagaaacttacaagacaggtcatggtctcagagggaaactgaagtggcgccctgatgaagaaattttgaaagcattggatgctgctttttataaaacatttaag

SEQ ID NO: 1695 - DNA, 695 bp, Homo sapiens
  full length sequence of bloodCirc_07159
gcggtggatgaattttattccaagatagaaggccagaaaattgacttaaaagctttacaacaggaaaagcaagcattgaagaaattagataatgttcgaaaggatcacgaaaacagattggaagctcttcagcaggctcaggaaatagacaaactgaaaggagagctcatagaaatgaacctacaaatagttgacagagccattcaggtagttcgaagtgctttagctaaccagatagattggacagaaattgggttaattgtgaaagaagcccaggctcaaggagaccctgttgcaagtgcaatcaaagaattaaaactacaaacaaaccatgttacaatgctgctaagaaatccatacttgttatcagaggaggaagatgatgatgttgatggtgacgtcaatgttgagaaaaatgaaactgaaccaccaaaaggaaaaaagaaaaaacaaaagaataaacagctgcagaagcctcagaaaaataagcccttacttgtagatgttgatctcagcttgtcagcatatgccaatgccaaaaagtattatgatcacaagagatatgctgctaagaaaacacaaaagactgttgaagctgctgagaaggcattcaagtcagcagaaaagaaaacaaagcaaacattaaaagaagttcagactgttacctctattcaaaaagcaagaaaagtatattg

SEQ ID NO: 1696 - DNA, 2026 bp, Homo sapiens
  full length sequence of bloodCirc_10346
gtacaggtgaacaaaggcagagtaaactgtcaccccagatgcaggtacatcaagacaaaaccctgccaccagctcagtcatcaagtgtgggtccagcagaagcccagccacagactgctcagccttcagctcagccccagccccaaacccagccccagtccccagctcagcctgaagttcagactcagcctgaagttcagacccaaacaactgtttcatcccatgtcccttctgaagcacaacccacccacgcacagtcatccaagccccaagttgcagcacagtctcagcctcaaagtaatgtccaaggacagtctcctgttcgtgtccaaagtccatcacagactcgaatacgtccatcaactccatcccaactgtctcctggacaacaatcccaggttcagactacaacctcacaaccgattccaattcaaccacatacatctcttcagataccttcccaaggccagccacagtcacaaccccaggtacagtcttcaactcaaactctttcatcaggacaaactttaaatcaagttactgtttcatccccatcccgtcctcagctacaaatacagcagccacagccccaagtcattgctgtgcctcagctgcaacaacaagtccaggttctctctcagatccagtcacaggttgtggctcagatacaggctcagcaaagtggtgtgccccagcaaatcaaactccagttacctatccaaattcagcaaagcagtgctgtgcagactcaccagattcagaatgtggttacagtgcaggcagccagtgtgcaagagcagttgcaaagggttcagcaactcagggatcagcagcaaaagaagaaacagcaacagatagaaattaagcgtgaacacaccctccaagcttctaatcaaagtgaaatcattcagaaacaggtggtgatgaagcataatgctgtaatagaacatttaaaacagaaaaagagcatgactccagctgaaagagaagagaatcaaagaatgattgtctgtaaccaggtgatgaagtatattttggataagatagataaagaagaaaaacaggcagcaaaaaaacggaagcgtgaagagagtgtggagcagaaacgtagcaagcagaatgccactaagctgtcagctctgctcttcaagcacaaagagcagctcagagccgagatcctgaagaagagagcactcctggacaaggatctgcaaattgaagtgcaggaagagctgaagagagacctgaaaattaagaaagaaaaagacctgatgcagttggctcaggccacagcagtagctgcaccctgccccccagtgacaccagctcctccagcccctccagcccctccaccttcacctccccctccacctgctgtgcaacacacaggccttctgtccacgcccaccttacctgctgcttcccagaagaggaagcgggaagaggaaaaagactccagctcaaagtccaagaaaaagaaaatgatctctactacctcaaaggaaactaagaaggacacaaagctttactgtatctgtaaaacgccttatgatgaatctaaattttatattggctgtgatcggtgtcagaattggtaccatgggcgctgcgttggcatcttgcaaagtgaggcagagctcattgatgagtatgtctgtccacagtgccagtcaacagaggatgccatgacagtgctcacgccactaacagagaaggattatgaggggttgaagagggtgctccgttccttacaggcccataagatggcctggcctttccttgaaccagtagaccctaatgatgcaccagattattatggtgttattaaggaacctatggaccttgccaccatggaagaaagagtacaaagacgatattatgaaaagctgacggaatttgtggcagatatgaccaaaatttttgataactgtcgttactacaatccaagtgactccccattttaccagtgtgcagaagttctcgaatcattctttgtacagaaattgaaaggcttcaaagctagcag

SEQ ID NO: 1697 - DNA, 278 bp, Homo sapiens
  full length sequence of bloodCirc_21643
gaatacggttggacagaatgaactgaagattacaagtgatcaagtgataaattcaggattgatttttgaagataaaccgaaaccttccaaacagtcacttcagtcttaccaagaggctttgcagcagcagattcgggaaagagaagaaagaaggaagaaagaacgtgaagaaaaagaagaatatgaagctaaattagaagctgaaatgagaacatataatccctggggaaaaggtggaggtggtgctcctctcagggatgcaaaaggaaatctgataa

SEQ ID NO: 1698 - DNA, 3590 bp, Homo sapiens
  full length sequence of bloodCirc_13454
gtcaactttgtagtgtgccaactctttgccttgctagcagccatttggtttcgaacttatctacattcaagcaaaactagctcttttataagacatgtagttgctacccttttgggcctttatcttgcacttttttgctttggatggtatgccttacactttcttgtacaaagtggaatttcctactgtatcatgatcatcataggagtggagaacatgcacaagtaagtattcactttgttcacatgaaaatatatatttcacttgaatagaactgcatcaaaatagaattttatttattacattaaaagtaattatgaattgtgataattttttaaagaagaattgtcataaatacaaaaataaaatcattggtatgcatcattcttctttttacttaaagcaccgttgacattttgggatggatgattcattgacattcagtactaacctgtgccttctaggatgttaggcagcattcctggcttttaccacctagatgccagtagcaccccttgagctgtgacgaccataaatgtttccagatattttcacatgtctcttggagaagcgaaattgcctgctgtgaagaaccactggcttagtctgtaggtgatagcagtggagagatgcagtgaactgagtagactggagagagagttagaaggaccggtaggaaataaggtgtcaaggatgacttccgtgtttccagcttgaggagtagagtagatggaagcactgtcttctgaggtggggagtcctgaaagtggggagcatgtagaaggtggcataggcatttcaagtgggtatatattcagcccctaaacgtgtttggtatatagtaaacactcaatgaagttttgctgtgtaagtgaatgatgactttaagatatctgtaagacatataagaggagattggtaactaagacatgtagtaggagctgggtagctgggctagagatggaaatttgggaatacagatggataaaatgtacttgattgaaaacccaggggcagagtctattagcagatcctgctgggtgttctgcaatgtctgagctatgatgtatgacctaggtaccatatttctgaattctgaatcacatatgtctgcaagaactttgtataaagaatcagacctgtggcttttattagtttttttctaagtctcattctattttgcattttccgtatttggcactgtcagtcgctacctctgttgtaatgtgtactgtctcctccatttccattgacattgcctgcactgacttttctttttcctctgtaaaccaacccttacaagttcctgatgtttttatttttataagaagagaaaggatatttagatggtgtttcagatgaagcaatttttataggattatgaccctattttttaaaaaacttgtacctctgatgggttcaaagtgatgctacaattaatatctgatgcaaaagatattaatcaggtttagattagattagattactgaaaataggggacttacatacattttggccaaagcaaaagtaatatgcttttcagttggaaggttagtaaattcatgtttagcaatgggaaattgtttctttttctgaaaggcagttgcagtcggtgaagttaactttgtaatactttagacctgtactgctgagtatgacagccactagtgcacatgtgactgtgtaagtttaaattaattaaaacttagaattcagttccttggttacactagccacatttcttttttttttttttcctttgagacggagtctcactctgttgcctagggtgaagtgcagctcactgcaacctctgcctcccgggtttaagcgattctcctgcctcagcctccggagtagctgggattacaggctcccaccaccacgcctgtacactagccacatttcaagtgctcactagccacatgtggctagtggctacattggacagtgcagatagagaacatttctgtcattgcagaaaatgatattggatagtgctgctttagagacatacagttgtataaaattagtaatgttactcttttacagtaagtattcagggagatagtgctacttgcttatatgctactgatatttaggatagaatcttggtgttgtaatttgacactattgatgtagaagattagggcaggtaagtaaggtttgccatgtgagtaaattgctaggattggcagtaaatagcaggtggataattaatttgaaaagtacatattttaatctcttttttagctcccttctattcagcttatacccatatatatttttctatgactttactttttcactttttttcttattatctgaatatgctcatttttttttctgcttaggcctttataataattaaaaatgtttaatgggtcagaccaaatacactagatgggacttagagcatttttatgtgttgtccaaagttattgtttatgtcgaatacaatctgtttgtttctttcagtctagttttacatggtatatatttcttacattacgttttaatatatttctttgactagccagagtttaagtctttaaaatgaaagatttgaatttatctgtgtactgaacagtttttaaattcttgcctctctctgttttatgattttttttgctttatgctctttatgaggtattcataatgtagttattgtacttgctttgattgacccacgtgtaaattcaaatatatatatacacacacacacatgtatacacactttatttttgtaattccctttaatgcctctatggtatgttttattattctgattcatatcttacctttaaaatgttatctaggccaggcacagtggctcacgcctgtaatcccagctcttagggaggccaaggcaggtggatcacttgaagccaggagtttgagaccagcctggccaacatggggaaaccccatctctactaaaaatacaaaaaattagccaggcgtggtggtgcatgcctgtaatcccagctactcgggagcttgaggcaggagaattgcttgaaccggggaggcggaggttgcagtgagccaagatcgcaccactgcactccagcctgtgcaacagagcgagactccatctcaaaaaaagagagaggaaaaaaaagaaaatggaaaagttctgtcattgcagcattgactttcttcctgttctctgccttttatgccttagtatatccgttccttctctttatattcccagtaccttgttttctatcccccgttaagacgtagaagggaagagggggctgattgtgtgccccattggcagttttactgcttgagaggtggtggcccctcattgtataagtaagcaagcagagactgagttgttaggtaactgaggacgtgtagctggaaaacagtgggtatgaactggtatctgttctgttctgagcatgctgttttaagtaatctaatttcatttgactgaaatttatttgcacgatctgtcacaggtaatttgccctttatcactttttatgaaacgaaaaactattgctgttaaaggaattacagatatcagcagacagaggagaatctttcttgagatatgggatgagaaagttcaa

SEQ ID NO: 1699 - DNA, 1229 bp, Homo sapiens
  full length sequence of bloodCirc_18540
gttttatttttcttctggtgatccatggatgcctattttaagtgagaatatcaggagtctaattagaaactctaaaagtatgtgggtagggcctgtcaactagttggcttcatgttaagttgattagttagctaccttgacattttcttgatggactcccaagtattattatgttctcttgttactacgttacatagtttctctctcattttgttttttcataagagttttctaattgcttgctttgagaaagtgggctgaggggtcctatttttctttgtagactttacctgatcctcattttcagtttattactttatcctatcctttgcaagactacagccttgatatattggtcactgcaaagaataaatatctactctcctccctggatcagtgaaggattctgattgctttgtacaatttttccctattcctgtggaacatagccctcttttattggaagtcttttatataaattatgtagactttgaggggaatctcagaatcttataaattgttaagacaatataaaatccattccttatttgatcagacctgtaagatccaaattctaggaatcaggatgtcatgtgatggtttatacctttgtataaattagtttgagaataaatgtaataatctgtgggattttattaatgtcaggtgataacttggatttctaaaagatttgttgatacgagggtaaaagtattagggtaaattaatcagaaaattagaaatgtgcatatatcttgctgtttgaattatgttaatcttagatttggaatttattattagttttcttttgttacctacagtggcacttaggagacctatttaactttgcaaataaaatttgtaacttgataactaattgttttaagttagtggataatagttatcaaagtgtttagtgtctttaagctatgataatttaatattgtctttttaaattatcctaggtagaagaatacatgttcacttccagtgaacaagagcatgttcccaaactcaattttgggtcgcccacccttcactccaaatcatcaacaacataataacttctttaccctgtcacctactgtttattcacaccagcagcttatagatgcacaattcaactttcagaatgcagacttgtctagagctgtgtcattacagcagctgacatatggaaatgtcagtccaatacagacctcagcttccccattatttcgaggaaggaa

SEQ ID NO: 1700 - DNA, 1574 bp, Homo sapiens
  full length sequence of bloodCirc_18111
tgtttgggaaatgggaagtaatgacagctggcacctgaactaagtacttttataggcaacaccattccagaaattcaggatgaatggggatatgccccatgtccccattactactcttgcggggattgctagtctcacagacctcctgaaccagctgcctcttccatctcctttacctgctacaactacaaagagccttctctttaatgcacgaatagcagaagaggtgaactgccttttggcttgtagggatgacaatttggtttcacagcttgtccatagcctcaaccaggtatcaacagatcacatagagttgaaagataaccttggcagtgatgacccagaaggtgacataccagtcttgttgcaggccgtcctggcaaggagtcctaatgttttcagggagaaaagcatgcagaacagatatgtacaaagtggaatgatgatgtctcagtataaactttctcagaattccatgcacagtagtcctgcatcttccaattatcaacaaaccactatctcacatagcccctccagccggtttgtgccaccacagacaagctctgggaacagatttatgccacagcaaaatagcccagtgcctagtccatacgccccacaaagccctgcaggatacatgccatattcccatccttcaagttacacaacacatccacagatgcaacaagcatcggtatcaagtcccattgttgcaggtggtttgagaaacatacatgataataaagtttctggtccgttgtctggcaattcagctaatcatcatgctgataatcctagacatggttcaagtgaggactacctacacatggtgcacaggctaagtagtgacgatggagattcttcaacaatgaggaatgctgcatcttttcccttgagatctccacagccagtatgctcccctgctggaagtgaaggaactcctaaaggctcaagaccacctttaatcctacaatctcagtctctaccttgttcatcacctcgagatgttccaccagatatcttgctagattctccagaaagaaaacaaaagaagcagaagaaaatgaaattaggcaaggatgaaaaagagcagagtgagaaagcggcaatgtatgatataattagttctccatccaaggactctactaaacttacattaagactttctcgtgtaaggtcttcagacatggaccagcaagaggatatgatttctggtgtggaaaatagcaatgtttcagaaaatgatattccttttaatgtgcagtacccaggacagacttcaaaaacacccattactccacaagatataaaccgcccactaaatgctgctcaatgtttgtcgcagcaagaacaaacagcattccttccagcaaatcaagtgcctgttttacaacagaacacttcagttgctgcaaaacaaccccagacttctgtggtacagaatcaacaacagatatcacaacagggacctatatatgatgaagtggaattggatgcattggctgaaattgagcgaatagagagagaatcagctattgaaagggagcgcttctcaaaagaagttcaagataaag

SEQ ID NO: 1701 - DNA, 178 bp, Homo sapiens
  full length sequence of bloodCirc_10507
ctttaccgatttgttacaactcaagcaagggccagcagaaattctcttttgacagatataattgctgcttatcaaagattctgttctcgacccccaaaaggatttgaaaaatactttcctaatggaaaaaatggaaaaaaagctagtgaacctaaagaagttatgggagagaaaaaag

SEQ ID NO: 1702 - DNA, 188 bp, Homo sapiens
  full length sequence of bloodCirc_18863
atgacaatcaaaacaaaacacatgataaaaaagagaagaagatggtggttcagaagccccatgggactatggaatacactgctggaaaccaggacaccctaaactccatagcactgaaatttaacatcactcccaataaattggtggaactgaataaacttttcacacatactattgttccaggccag

SEQ ID NO: 1703 - DNA, 356 bp, Homo sapiens
  full length sequence of bloodCirc_00144
gagaattctcaccaaatgttcccaaatccttatcctcagctgtgaaggtaaaaattggaacatcactggaatggggtggaacatctgaaccaaagaaatttgatgactctgtgatacttagaccaagcaagagtgtaaaactccgaagtcctaaatcagaactacatcaagatcgttcttctcccccacctcctctcccagaaagaactctagagtccttctttcttgccgatgaagattgtatgcaggcccaatctatagaaacatattctactagctatcctgacaccatggaaaattcaacatcttcaaaacagacactgaagactcctggaaaaagtttcacaaggagtaag

SEQ ID NO: 1704 - DNA, 14683 bp, Homo sapiens
  full length sequence of bloodCirc_03188
aaaataaaattaatgaagcatagaagttacggagaactactggaaagaagaaatacaagaactcaaggaagagacagccagacaacagtagagtgtgaaatgggaaccagcagaaaaaaagaaatagagaaaaatgatcaagccatttcagaagtacacaagggagactagacaccatggcaaagatcataaaagtagaaatgaaattttatggtaagtatattttaccacaattttgataatgcaaagaaagaaaacaaaagatagacaggagaaaaatgagtaaaacaggtacacatttatttttattgatgcgtaatagatgtacacagttttaggatacatgtgataatacagtcatataatttgtagagatcaagtcagtgtagttgggtcatctgttaccttaaatatttctcttttctttgtgctagaaccactcaaattctattcattttgaaatatataatagattgtaaactacagtcaacctactgatctaacactaggtcttctatcaaaccatatatttatacccattaatcaacttctctttattccttccttcctcctaccctttccagcctctcataaccaccaaatctactctctattttcatgaaatccacttttgtagcttccacatatgagtgagagtatgtgatatttgtctctgtgtgcttggcttatttcacttaacataaagacctacagttgcatcagtgttgctgaaaatagcaggattttattttttttttatggctgaataatattgcattgtgtatactacattttctttattcatctgttgatggacactgaggttgattttatattttggctgttgtgaatagtgttgcagtaaatacgggagtgcagatgtctttttgatatgttgattttctttcttttggatatatacccagtagtggaattgctggatcatatggtagttctgtttttatttttttgagaaagctctgtactcttttccatagtggctgtactaacttaaatttctaccagcagtgtataagggttcccccttctccatatcttcgccggcattcattattgcttgtccttttagtaaaagccattttaactggggcgagatgatgtctcgtagttttgatttgcttttctctgatcattcatgatgttgaggattttttcatacacctcttggccatttttatgtcttcttttgaaaaatgtttattcagatcttttgcctgttttttaattggattatttgtgggggtgtgtctgtgtgtgtgtgtgtgtgtgtttgcttgcttgcttgcttgcttccttgctgttgagttgtttgagctccttatatattctggttgttaatcttttggcgggtgagtagtttgcaaatattttctcccattctgtgggttgtctctttacttcattgtttcctttgctgtgcagaagctttttttttagcttgatgtaatcccatttgtctatttttgctttggttgcctgtgcctttgaggccttaaacaaaaaaagtttggccagactagtatcctggagtgttttcccagtgttttcttctggtagtttcatagttttgggtcttagatgcttagatgtaagtcttaaatccattttgatttgaattttgtatatggtcagattgttttgttcttctgcatgtagttatccagttttcccaccaccgtttatcaaagagactgtccttttcccattgtatgttttagctcctttgtcgatgatgagttggctctatatggatttacacctgggttccctgttctgttcctttggtctgtgttttgtttttatgccagtgctgtagctttgtagtaaattttgaagtcaggtagtgtgatgcctccagctttgttgtttttgcttagtattggtttggctattcaggatcttttgtggttccatatacattttaggatttgttttctatttctgtgaagaagaatgtcattggaattttgatagggattgattgcattgaatctgtaaattggctttgggtagtattcaacaatatgaattcttccagtccctgagcatagagtatctttctattttttaatgtccacttcaatttctttcatcattgttttatagtttttcttgtatagatctttcacttctttggctaaattgattcctaggtatgttatattctttgtagctattgtaaatgggattgctttcttgatttctttttcagattgcttgcagttggtgtataccaacgctaccgatttttgtatgttgattttgtatcctgcaactttactgaatttgtttatcagttctaacaatttttttggtggagtccaggtttttctaagtataagatcacgttatctgtgaacaggcttatttgacttcttcttttctgatttggatgccctctatttctttctcttgcctaattgctctgcccagtacttccagtactatattgaataaaagtggtgaaagtaggcatccttgtcttgttccatatcttagaggaagggctttcaattgttccttgttcaggatgatgtttgctattggtttgtcatatatggcctttattacttgagatacgttccttccatacccagtttgatgagggttttttaaaatcataaacagatgttaaatcttattaaatgcgttttcagcatctgttgaagtaatcatggtttttgttcttagttctgttaatatatcacatttattgatttgcacatgttggaccatccttgcatccctgggatgaatcccacttgatcatggcaaatatctttttactgtgtttttaaatttgatttactagtatattgagaatttttgcatctatgtttatctgtgatattggcctgtagttttctcttcattgtctcctctggtgttagtatcagagtaatgttgaccttgtagaatgagtttggaaatatttcctcctcttcaattttttgaagagttcaaatagaaatttatattagttcctctttaaatgtttggtagaatccagcagtgaagctataaggtcttgggcttttctttaatggaagagtttttattatagctttgatctcattactaaaatggtcattttttttttttttttttttttttttggtaagtaaggatagatacgacagccaaaagagatccaaaacgggcaaaactggagccccaaaaaagaaaaccgattccgtagaatacataatttaaagtataatttaagatgtttcttttccttaaagaaaggacttaaatctattgaaaagacacaacatgctccagggaaaactggcgcaacattgagacatattctggtaaaaaatttcaactggcaaaagatcatataaagaaaatcaggttggtgcagaataacagaaacattcaataccagaaaatagtagaggaactacatgtcagctactcaaagaacatgtgagccaaatatttttttgtgctgccaaggtgtcctttgggtataaagactatgtactggctggtagttttaaacattcagggttttacatctttttatatgagcctttcttgaggaaacatctagaagacagataccagctaatcagtaaatgaaaaaggaaacttcagcaaaggaatgaactgctaaattctcaataattaactagaagatcatattagggatcatagtcttcctaattttaaagggagtactttaatgtctcaccattatatatataggctgctttctagatatctgtttatcaggtaatctatttactatgaattctctttttagtcacaagtggctgttgaattttatgtctaataaggcataggtttttttaaatctctcagtatgattaattttatgaataaattgtctaatgttacaccttccttccttgaattcctggcataagctttatctcaatcatgttgttttatattttatatatattgctagtttaggtttttctgattttttttttttttttttttgagacagtctcactctgtcacccaggctggagtgcagtggcacaatctcggctcactgcaagctccgcctcccgggttcatgccattctcctgcctcagcctcccgagtatctgggactacaggcgcccgccaccacgcccggctaattttttgtatttttagtagagacggggtttcactgtgttagccacgatggtctcgatctcctgacctcgtgatccgcccgcctctgcctcccaaagtgcgggattacaggcgtgagccaccgcgcccggcctctgatgtttttatttaagatttttttgcatgtgttgtcattggtgatgttaccttaaaatgttcttttatagttgttcctttctgggttttcattcaaggttgtgctagacttataatttgagaaagttttcattcttggccaggcgtggtggctcacacctgtaatcccagcactttggggggcccaggtgggtggatccacctgaggtcaggagtttgagaccagcctggccaagatggtgaaaccccatctctactaaaaatacaaaaattagctgggcctggtagtgggcgcctgtcatcccagttactcgggaggctgaggcaggagaatcacttgaacctgggaggcgaaagttgccgtgagccgagatcacaccattgcactccagcctgggtgacagagtgagactccatctcaaaaaaaaaaaaaaagaaagtttttattcttgagaataatgtttatgtgggaaaacttctgggcttgagacttacatacctataacaactaactctaccacttatttaatagttgtaggtatattctgttttcttaagtaggttttgataaattatttctggaaaattcccctgttttctctatgatttcaattttttctataaaaattgtttctattacccttataatttatagtacatataaatcacactcctttttatttgtaatgttggttttcagtgccttgttttgtccttgattaatttgactaaagatatatcaatattttttgtcaaaaagctaatcttttttcagctattttttcttcggtttaattaatatctgatcttctctttttatttcctcctcttatttgctttgggtttactgtgttgttccattttctgagttcttgaattgaccgtagcttattgattctttaaatgtttttcttttgtagtgtatacatttgaaatgaacagtttcttatagctattttagataatatcttaagcttagatcatgttactctttaacttatgaaccatttatatgtaggatttttaaaatttaaatttccaaacatgaggcttttgagattaactttttatggttacattgtcattttacttgattttggtcagagatcagttgttttttagtactcttggaatttcctttgtggccaaattcataaccattaggttttgttttggggctttcagctcaacttcattgaggtctaattttcatacaataaaatgaacataatttaagtatatagttcagtgaattttggtaaatgtatataccatgtgatgactacaccaataaaaatagtgtgtgtccatcaccccagaaagttcccttgtgcataccccacttgtagtcaattttcctattcctgccccctgctgtaggcaactaatgaaatgctttttatcactatagattaattttgctgcttcttgaactgtatatgtatagaattttacagtatgtactcttgtgtctgatgacttttgcccagtttaatgttttgagatgcatgcatatatcagttttactttttttaattgctgattattattatgtgtgaatatacaagtttatccattcacctattgatgaatattggagttgcttccagttttaggctactgtgaaaaagctgctctgaacattcatgtgcaagtgtttttgtggatatgttttattctcttgggtaaatatctaggaatagaattttgggtcatatggtaagtatgtgtttataagaaactgatgttattttttaaattggctatataatttttcagttggctttatatttctactaggagtgttccagaggctcctcatccttgccaacgcttggtattttcagtctttttagccattctactggagcagtagtattttattgtggttttaattagcacttccctgataactaataatattgacccatttcccatgtttctttttattatatgctttattttgtgaaatgtgtctatgagttttttatatattctaggtacaggtactttacaaatatttcccatttcttaataatgataccttggaagatcagatggttttaatttttaggaagtctgatgtatacatttttctaggtcactaattttgtgccctatgaaaactttatgtaccccatagtcaagtacattttttcctatgattttttaaattttataattttagccaaatagttatagtttttatgtttaggtctgtgattcattttgagttaaattttatggtttaaggtagaggtttgaggttcatgtttttttcctccgttttagttgttctgtagcagcatttattgcaaagatattctttctcaatggaattatactggcaatattgaaaatctgttatctggactctattctgttccattgatctatatgcattttctttgtatcattaccaccttgtcttgactactttagctttgtagtaattctcaaaatcaggtagtgagtccttcagctttgttctttttcaaaattgttttggcttatatctttcttatataaattttagaatcagatcatcagtttctgcaaactgagattgtgttgaatctgtagatcaattttgtgtcttaacatcccccagcaaagttagaaagccaggcagtaatatcagagggcacaagcccagattgaagctggaagacatagtgctccagaaaggtccttccaaaaaaaagaaaagaagctgctcaaaacagacaaaatctttgatctatctttatccagaggatattgttagttctctagaatttcaagctgaaataatgattggtaactgaaaattaagctattttaaattcagaaaagcaaaacacggtataaggaaagaacttgactacacagtatggctcagcaatgattaatacatacagttaagtagtgaaacctaggcctagcacggtggctcatgcctgtaattccagcactttgggaggccgaggtatgcagatcacttgaggccaggagttcgagaccaacctggctaacatggtgaaatcccatctctactaaaaatacaaaaattagccgggcatgttgctgggcacttgtaatcccagctacacgggaggccgaggcaagagagttgcttgaacccgggaggtggaggttgcagtgaaccagaatcaagccacttacgctccagcctgggccacggagcaagactccgtctcaaaaaaaaaaaagtaagcacccaacaaatgttagccattgttatcattaataacaatagcttccttgctaacaaatactaggataacgtctctatccatggcagcaaagaaaaaaggaatttgctaagttatctgatgccagtgcaccatgcctcatgcacagcaagccttcagtaaagttccttgtagagtcacaactgaaaggagctttagaaaggcaattataactaaaggaggccttagagagtataaatttaacaaaatccatcagttagtatgtcttcagcttccaataaaagtttaaacaataaggaacatttattatttcatgtataaagcccaaagatgaggcagcccccaggttagtttatttcatcagttcagggatctagtttctttctgttctgttccgttctatgttggctgccatcttggttgcaaggagatccaggcaacacatcttcagacaagatcctaggctagaagatggagtccttttctaagaaaggtttcccagaactctctctgtagacttccatttatatctcactggccagaactgagtcacatgtttattcctaaaacaaacactattcaaagggagtggaattaccataatgatcttagagtaattaagattctcattctctttctctctctctctctctctgtctccccccccaaccccacacacacacatactcactctccctcactcattttcacacacacacacacacacacacacacacacacacacacacacacacacttcttctgaaccatgggataacctgatacctgaacaaaattgtggttttatggaagggaagtaaaagggacatgattgttgggaagtcaatccaatgtgtctttaaccactgtctcaaaacacattagtggtagcacctagtgagttcaataggtagaccagaaccctggtctccctattcctaattttcccctacataaacaacctccttcatgaattattatcaacatagctacttttcctaaaaaattttgaatgtatccacacaattctacctccagttctttttggggggaaaatgtgctgtaaaactatacatgctgtttttgtgaagcatatgaaaatccttattccacagactcatgataaaaactgaaaacttgaccacctttgtaatctttttcttcgttcttattcttctctcccttcttcccttaatcagtcatattaaactatttgcagttcctttaatgtatcatgtttaaaccgctgttcatttgctcatactatttctgctatctagaaaatgtacactagtttccttttttggcttcctcattggaatatcttccagatttcaagtatctgtgcctccatgaaatctttcttgacatagctccatctccataaaattggttgtatcactgtacatccactatatcatgttttagatactcctacacatttatagtactaatttctttgcagatttttcttccttgtctattctgagctaacttgcttgctttctctttctttcctttctttctctttctttctttctttttctttctttctctccttttctctctctttctctatctcttccttcctccctccctccctccctcccttcctcccttccttccttccttccttcctttccttcctttcttccttccttcctttccttcctttctttcctttcctctctttctctctttctgacatggtctggctctgttacccaggctggagttcaggggtgcaatctcagctcactgcaacttcttccccccagactcaagccatcgtcccacctcagcctccaaagtagctgggactacaggtgcactccaccatgcctggctaatttttgtattttttatagaggtggggtctcactttgttgccctggctggtctcaagctcctgagttcaaacaatctgcctgccttagcttcccggcgtgctgggattacaggcatgagccacctcgcccagcctaatctgaacttttttaatgtagagcctgtttccctgtaatagagactgtttgccatttgtcttgataaatccaagatttagcatgatattggatgcataatagtcaccactaatagttttgtttaatgaatatatatacaactaatttgggggaggagagagatttttgtaaattgtgttctgcttgattccgttattttcaactagtggaataaagatgtggttctgtgatctcttcattttgaaagattttttttcagtaaggcaaaagcgattaagcataatatatttctgtgtacaaaattttctttagaagttaaagacttttggaggaaaaacatttcagattatgtgttatagcttatagaacaaattaagtccttagctgagaatacttgtcaaaggaggtaaataaatattacataattattcctaatacaaattactcagcgaacatttgtttctatagtaaatatgctataaatagaattgttcactttatgattttttttctttcttcattttagcatttatgacattaacagagaacaggactatgtcaagaattctgagggtatacttggtgaaaatgaattaagaccaccctcccagctacattctctcttagagaagatcgagacagggtccctatcagaaaagagtgggtattaaactaagtgctataagtcataactaatgaatccagaatagaatgattaaaatgtttttagttttaatttagatcatgtaaaacaaaaagactttaaaaaattatgatttccagtacctatattttttaaaataatcattagtccaaaagtaataggtgattaacttttcaaattgcaacataaaacacgtatgttcctctgttgtgattgaatttaacctttctcacatgctctttattcatcacttaagccctaagggatatacttaatgctttataggcaagcacttttcaagttttaccgtcttagatttttaggtttctttgtggtatagccccctcttcattttcatagtctggtaatcttgaatgtttaaataaagcttgagcattgctcagcagttatgagaccattcattcataaagtgtttgtattgtttggtgcactgattggactctcaaatgaaagtgtattttgtaaagaagggagagcgtcaaatttctagatgaaattttcatctgtctcctcatttactgaacaggaaacttgtgctttcttgagagtgtaattgatgtcattatgaacccatgaaagatttaagattagctatgattttccaacaactttgtttttaacatacctctgctaaccataaaatcactgcttttatgcatatactgctatatattgaagaatactggcctaaagtggaagcatttttaaccataaataaatagttctggaaataaaaatatatataagcaaaaaataatttggtacttgttcctcctccttcgttttaaatcattggctttatttatagctatatagggaacagtattccccacactggtgttaatgaagtgttctctgaccatgtatttgggaaaccctgtattagtgtttttaattgcaccatctcttcagttttcagttcattattgtgcattatgatgctcaaaaatgaggacgtatgtaacttaaatctgtgcctacctattaatgacttacagaatttagagaagttgataatcacagtcttcatttccagagttactttttaaaatatttctttcagtgtaaacaatgtgtttctcaaatattggtctataggtaattcaattttgaaactttcttgcttttttataaatatcaaatataaagttcccaaaattattgtttctaaagaaatcttgatttgtgtttaggctagcagtacagattatttgtaaaatgaatttgaaaatgctcaggtttgccagtttgttttgagtaatgcagctaataaagctttaattttaactcttataactggtgttttgctatttgcatctattcagaatatccctattttttaaagcactggtatattgaaggagaaagtgaaactgagcaaaagtaaaagtaaaacttagaatgaatatataaatcatgtatatcaacttcagaatattcgtaaacatttcattcttttctatttacagtctttcattttgatacttggaagtttattaaaagattttttaaatgccttgataattaaagtattaggacaatttagtctaaatttagcttactaaaatgtttgctttcatttctgagatagtctagtttttgtatattggttacttacaagttagttttaattgagattcttttttctctttaatttttgaactttaatacatttggcagttttggtaaaagtaggaagccatattactgtacttcataacatttatactatatgaccagtacttccagtgctatataaatcattctcttctccttattgtttataaatactaggtttgtaaaaccccccaaccttaataaagagaatagaaagagtacaaataggagagtgaacagttaaaatggttagatgcaagagtgtccgtaggtcattaggctcagttcttgctaaagtagagacttgtaaaatcaaaaggcacaaagagtcagtcaacataattactggatccagtcggtaattctcaattaggaaacgtgcctctcatgggaagggtgtatcacagtccctcaaagctatctcacatgggtatggtttgaaaaaagcaccttcaaaaaattgtaagtacagctctgttgtataaaatgaaagaaagtgattttataatacaactcacaggaagtaaaactcaatagactcttcttgacgggtgaggaaatcccagagatacaatgatttctattgtgtctggtgagtgggcaatagtaggtcccttaaaagggacctagctgacttagggatttaatgaaaatatgtaaagagtaagtttatcaagtgtggcgtatatatttaaaaaaaaaagaatagaaacaaaggatgaaaaaaactaaagaatgagaaattgctctaaaagtctaagcagctcctgaccaccaccttgacactacagttgtatccacttttgaccaactacagttatagtacacagctttcaaccaaaagacataccaggtctggcaggacatattttagctcctgtactaaaagtaattcagcttcagttctaatttatttaggttattttctttacatcagaggtcttttaaattttgttaagacagtacaaatatttcttagttatataggaaaggaataggtgatgttttgagtgatattcagtgtgtctcccttaaccccatcctttggaatcttaaatagctgcgttatttttgtttgtgttttacagtttttgagacagtgtccttgagttcagactctctcttccagagggcagtttcactcctccatacttcttacttggactcttcatctgagcatggttttcagtacagtcaagtgactttggtgaaaaatgacattttcttaaatgaggtgaggtgcttggtacacactatgatggttttgttttagttttaaaagaggtaaacccatcatttttggtatataagcctagcactttttagctataatttttcagacgcagcagatccttggaaatagtcacttggaaggtaattattctagggaatagaaaaataatgcatttatgtttagtcttaatggcaggaagaattcaaatgatgcatttttaaaaatttgcaagacaaaatagtatgtttatagcgtttggttattctgttctctctttatacagtacaaaactttttaccaacaaaaaaaagcaagtagttatactcaggaagaacttcaagacacttacgggtttcttctgtttgatactgaaaagcaggtaagggaattaggttgtagaaaattaatggtatcattagtcttaagtattgtggtacttcagttctgtaagagttgtaagattaccaattcatcagtgttttttgttgcttagtttggtggcatgtaaatgacagcaacaaaaaagccagtcatgaaggagatttgatttgatttctacaacttttcacggtttctctttagttttatctgaaatacatttgtaagcttagggtgcaatttggattaaaacagttttctttagtgtcaataatggcctttactagagtgaatggatatttttccattctggattatcgtttaatcgaaactttgtttcctgtggaaatttttctggtttaagttatttgatttgggagataaatcatgtaacttaataaactttggcatcctggttaactgaaattgcttcattcaatatttgaagactgaaatctgtattgttgcctgtacctaaattatgggagaaggaaaggaccgtgtacagggtaggtctccaaagatatgtatggcttccgagatacattttaaacaataccagagatctaaaataattcaaagttagtgcttcgattaggttaatggtttataaagaaggggggcagatttgtttagcggataattagcactaacatataataaggactatatagtaataccagaagagtttatcccttttgaaatttaatcgtctgaattcaaataacacgctctgggttcttactaaaaatgacatttggcaacaagacattttgaaatttcatgcttctaaagctgtagttggaaaataaatcttctagtggacttacctgtgaccctgcttagtttggttttcctgacatttttgttgattgaaatggtaaaattctatgaaaagtttgggccattaatcaaaatacagattgctttgcataagttttctttgtgccccgaatacctacagtgagcagactatttattttaaagcttatggattaggccagatgcagttgtgcctcatgcctgtaatctcagcattttgggaggctgaggtgggaggattgcttgagcccaggaatttgagatcagcctgggcaatatagtgagaccttgtctctattgtataataaaaaataaaattaaaaaaaaaaaccttacagattatagcattttttcattgcttcaaagactgaagcaaagtaatcttttgtttaaaggcaaaattggtatgtcagtgtggactccgtgttggcagcagtgctgttaccactctgggtgatccagccaaag

SEQ ID NO: 1705 - DNA, 268 bp, Homo sapiens
  full length sequence of bloodCirc_18463
gtgtgtcacggggtcccagccctgtcagccttggaaatcaggataccttacctgtggcagttgcccttacagaatctgttaatgcctactttaaaggagcagatcccaccaagtgtattgtgaagatcactggtgatatgacaatgtcatttccaagtggaattattaaagtcttcaccagcaatccaactccagctgtgttgtgcttcagggtgaaaaatatcagcagactagagcagattcttccaaatgcacagcttgtgttcag

SEQ ID NO: 1706 - DNA, 301 bp, Homo sapiens
  full length sequence of bloodCirc_12665
taaggcgaaagagaatgaaagacgtagataacctcaaaagtataaaagaagaatgggtttgtgaaacaggatctgataatcaacctcttggtaataatcaacaatcaaattgtgaatattttgttgatagcctttttgaggaagctcagaaggttagttccaaatgtgtgtctcccgctgaacagaagaaacaggtagatgtaaatataaaattatggaaaaacggattcaccgtcaacgacgatttcagaagttattccgatggtgccagtcagcagtttttgaactccatcaaaaaggg

SEQ ID NO: 1707 - DNA, 631 bp, Homo sapiens
  full length sequence of bloodCirc_22491
cttcaaggttactgactttttatgatgtttggtggctatgagactatagaagcatacgaagatgatctttatcgagatgagtcatctagtgaactgagtgttgatagtgaggtggaatttcaactctatagccaaattcattatgcccaagatcttgatgatgtcatcagggaggaagagcatgaagaaaagaactctgggaattcggaatcttcgagtagtaaaccaaatcagaagaagctaatcgtcctttcagatagtgaggtcatccagctgtcagatgggtcagaggtcatcactttgtctgatgaagacagtatttatagatgtaaaggaaagaatgttagagttcaagcacaagaaaatgcccatggtctttcttcttctcttcaatctaatgagctggttgataagaaatgcaagagtgatattgagaagcctaaatctgaagagagatcaggtgtaatccgagaggtcatgattatagaggtcagttcaagtgaagaggaagagagcaccatttcagaaggtgataatgtggaaagctggatgctactgggatgtgaagtagatgataaagatgatgatatccttctcaaccttgtgggatgtgaaaactctgttactgaag

SEQ ID NO: 1708 - DNA, 225 bp, Homo sapiens
  full length sequence of bloodCirc_08822
gagaagtacagcatcggggagcccacagtgccatccaccctggcagaggagtttacctacaaccccttcatgagagtgagggagaagacggtgcagcagcacgcaggtgagacggacccggtgaccaccatgcgggccgtgcgcagggagaaggaccagttcaagatgccccgggactgaggccgccctgcaccttcagcggatttggggattaggctcttttag

SEQ ID NO: 1709 - DNA, 161 bp, Homo sapiens
  full length sequence of bloodCirc_09342
gacatcacctgttccaacccagtgtgatctattggctggagcaggaagaggagttgagggcagggcggagagcagttctccaagaatggcgacttaaaaccaaagggccagcacttcggcaggatagatcttggttcagagcatcaaatgagacacagacg

SEQ ID NO: 1710 - DNA, 296 bp, Homo sapiens
  full length sequence of bloodCirc_21674
atgttctcagtgcagctgagtcttggtgagcagacatgggaatccgaaggcagcagtataaagaaggctcagcaggctgttgccaataaagctttgactgaatctacgcttcccaaaccagttcagaagccacccaaaagtaatgttaacaataacccaggcagtataactccaactgtggaactgaatgggcttgctatgaaaaggggagagcctgccatctacaggccattagatccaaagccattcccaaattatagagctaattacaactttcggggcatgtacaatcagag

SEQ ID NO: 1711 - DNA, 577 bp, Homo sapiens
  full length sequence of bloodCirc_03883
cgcctagaagattatcagcgtcgccttgatacctccagcctgaagttgtcagagtacccaaatgttgaagagctcaggaatttggatttaacaaaaaggaagatgattcatgaagggccattggtttggaaggtgaatagagataaaactattgatttatacacgttgctgctggaagacattcttgtattgttacaaaagcaggatgatagactggttttaaggtgtcatagtaagattctggcatctacagctgatagcaaacacacgtttagccctgtcattaagttgagtacagtgttggttcgacaagtggcaacagataacaaagctttattcgtcatttccatgtcagacaatggcgctcagatttatgaactggtggcacagacagtttctgaaaagactgtctggcaggacctaatctgtcggatggctgcatcagtgaaggagcaatccacaaagccaattccattaccacagtcaacacctggcgaaggagataatgatgaagaagatccttcaaaattaaaagaggagcagcatggcatttcagtcactggtttgcagagtccag

SEQ ID NO: 1712 - DNA, 554 bp, Homo sapiens
  full length sequence of bloodCirc_19740
ctctgagaaagtggccgaaagaaaagaaactgaattttttagctctttacccctgaagatgaacccaaatattttgtctcaagactcacaacatgtgaaccttttttttgacaaaaatgatgagaatgtgattttacaaaagaccacaaatgagagtatggaaaacagctgtccacaagtaactgaagtaactgccacagaagaacatgttgataaaatgtaccttaatattttgaggaaaaaaataactgttaattcttcatcattatctcaggatgacaaaattaataaaacttacagatctcaacttagttctgaagaagaaggggctgtaatgggtaaacaggtaccatacaagaaggccagaagtgcacctcctttacttaaaaggaaaccccagagtggattatatgcgtcagttaggagctcaggctatggcaaacccagttcaccactcaagatgttttctactcttgaaaagaaaacttcagaggacattataaaaagcaaaaacttgagatcgatttctacctccaatcaacctaggaaaaaag

SEQ ID NO: 1713 - DNA, 173 bp, Homo sapiens
  full length sequence of bloodCirc_20697
ttgatcacagccgagttaaattgacattaaagactccttcacaagattcagactatatcaatgcaaattttataaagggcgtctatgggccaaaagcatatgtagcaactcaaggacctttagcaaatacagtaatagatttttggaggatgatatgggagtataatgttgtg

SEQ ID NO: 1714 - DNA, 229 bp, Homo sapiens
  full length sequence of bloodCirc_05413
gccaagatagccaggttaaccaaacgctttgaagcagccaaagaagatcttaagaaaagacatgaacatccacccaacccaccagtatcaccaggaaaaactgtaaatgatgtcaacagcaataataacatgtcttacagaaatgcaggcacagtgagacagatgctggagtccaaaagaaatgtaagcgagagtgcaccaccatcctttcaaactcctgtgaatacag

SEQ ID NO: 1715 - DNA, 262 bp, Homo sapiens
  full length sequence of bloodCirc_02968
ccttcacttaacttaagggaccttggattatctgaactaaaaattggacagattgatcagctggtagaaaatctacttcctggattttgtaaaggcaaaaacatttcttcccattggcatacatcccatgtctctgcacaatccttctttgaaaataaatatggtaacttagatatatttagtacattacgttcctcttgcttgtatcgacatcattcaagagctcttcaaagcatttgttcagatcttcagtactggccag

SEQ ID NO: 1716 - DNA, 251 bp, Homo sapiens
  full length sequence of bloodCirc_00185
ggtggatgtgaacactgaccggaagatcagtgccaaggagatgcagcgctggatcatggagaagacggccgagcacttccaggaggccatggaggagagcaagacacacttccgcgccgtggaccctgacggggacggtcacgtgtcttgggacgagtataaggtgaagtttttggcgagtaaaggccatagcgagaaggaggttgccgacgccatcaggctcaacgaggaactcaaagtggatgaggaaa

SEQ ID NO: 1717 - DNA, 861 bp, Homo sapiens
  full length sequence of bloodCirc_22996
acaaacaaaggtgatgcacttgccaaccgagtccagaacacgcttggaaactatgatgaaatgaagaatttgctaactaaccattctaatcagaatcacctagtgggaattccaaagaattctgtgccccagaatcccaacaacaaaaatgaaccaagcttttttccagaacaaaagaacagaataattccacctcaccaggataatacccatccttcagcaccaatgcctccaccttctgttgtgatactgaattcaactctaatacacagcaacagaaaatcaaaacctgagtggtcacgtgatagtcataaccctagcactgtactggcaagccaggccagtggtcagccaaacaagatgcagactttgacacaggaccagtctcaagccaaactggaagacttctttgtctacccagctgaacagccccagattggagaagttgaagagtcaaacccatctgcaaaggaagacagtaaccctaattctagtggagaagatgctttcaaagaaatctttcaatccaattcaccggaagaatctgaattcgccgtgcaagcgcctgggtctcccctagtggcttcctctttattagctcctagcagtggcctttcagttcaaaacttcccaccagggctttactgcaaaacaagcatggggcagcaaaagccaactgcatacgtcagacccatggatggccaggaccaggcaccggacatctcaccaacactgaaaccttcaattgaatttgagaacagctttgggaatctgtcatttggaacactcttggatggaaaacccagtgcagccagttcaaagactaaactgccaaagttcaccatcctccaaacaagtgaa

SEQ ID NO: 1718 - DNA, 2566 bp, Homo sapiens
  full length sequence of bloodCirc_02080
gaggaagagtagaattatgttctggtattgatccacaaagaggatttgcattttattcatactataaaagtacctttaatggagaccttgtggtaattgaatctatactgtgtatcactatcaaagtatctttttaattattttatgttatacaatttaagtcatggaaagggggatgactgtattgtatcttttaagtataatgtatagcctttaatattcttaaagtggatgttagttaaggacaatttttagttgagagagagtgaaagagagagagataaggggggcagagaggattccattacattcagcacagtatgaaactaagtcaaaggagttttgttaattaaattcaattgccatccattagaccagtggaatgagatgactctgcctggtgctgacacagcacaggtatgcaatttggctaaatggccatttccaaaccatagcacacatttgtctacttgttcacttttttttttttttacatgagagtttttactcttagaaaagtcaaagagtaacccagtgcttgtcgaggggtaaaggtatcatttttatgcagcatattgtgaagtgattaattttttaggtgaaaaatatatagttcacatagagattatttgggagaaaatgattttttaaaaaatatgcagtatctgcgggcaagcatacgaacaaatatatatacacacacacgtatcagtatagaaaaatgtgtacttttaaaattcagttgtcttaatctgaagctatttgagtcatattctctggattttttaaagcatcctacaatctgtatatataattaggggaagttgtaataattgcaggagttataaaagcgaaatttaggtggtgggtaagtgtatctacattttggcataaatcactacttttagaggatttatatgtcagactgataagtttcttaccatggtgaaatgacaagaataccactcaggcattggctgagacataattttgacagccagcaagcttgcagtgttgctgagtgcacagatttccacttcctgccaagattaaaattggcaaaaaccaaaaaggatattagggattgtcactttaagaagaaataacatgttaatgttctgcatttgcttaagaaatgtaagagtgatctcttgaactgtagtctgttgaaacttacaagtttgcaatcaatagaagagtttgattaatatgagcatcaaaaattaaaataagtagaggctctctgacacttgttagaattaagactcattataggtttacttaataggacataattactttccttctatataagatgaattcttcacaaaagctatgaaatagttttcctcacagtccctgaagaacaaaggcctactttaagtttgtagatttgaagactgaatgcttgctttacttcctgaattttcttattttttcctgtgtgagcagatggtttttctttttataagttgccagatctttcctataacaataactgccattattgagaacctactgtgcgcttattctgtactgagcactcagatcttcagagttttttcttacttaggactttttgtttaactctaggtgtaaaaatgaagaaaaaattatatctcatgttgtgaaagagtcagactctgaaatctgcttatactttgctatttacagtaagtacttttgaaacagctgtagacgttcaaatgaaagtagcaatgtggagtggggaatgtgggaacattcatttgtgaagactttgcatttcttcagctttatagccaacagaaaaggagattgttgtgcattctattaaatactgccagtatgattaatttaaagggttacattttattgaaccctggtgtagatgttctttgtcaacccacattcacagctagttagagtgtgtgtagcatttatcaaaactttctggagcccctctcacctcattagcatctgaatctctattcagcagttaatgtccgttactgctagagtgctcaattcttgttttcaataagccagttgtaaaatgtcagactgtcacttacaatataaaaaaccaaaaatgatggtatttgtaaaaatgttatcacctcataaaaacaaattgtaaagacatgaaagtgatcttgctatgctggtctttcagaagtgagttagtacagctactttaaataccagttgtgtagattcccacacttttctaccaatggagaggtttacacaagcataatttaagttacaattacactaattaacatctcatttgcataaattgttgaagtcaaaacaacaaagaattgtctaagaagcttaatcctatttgtccaaaatagaaagattttttttttttaaaaaaaaactatgctctaaaaattggcagcttaagtatgtctttagtatgttgagctgtgtccttttaaaaataaatgttttcaattttcttaataatatatttctctattctttttagaatccttcatttttagtatacttttaaaattgaacacacacaacactttggttcctaaagtaatgataacaagaaattaaaatcaag

SEQ ID NO: 1719 - DNA, 229 bp, Homo sapiens
  full length sequence of bloodCirc_04138
agaaaaaatggctcaagcatatgactttgcactggataaaattggaatggaaattatgtcctatcagatttgggtggattacatcaatttcctaaaaggcgtggaagctgtaggatcttatgcagaaaatcaaagaataacagctgtccgaagagtttatcaacgaggttgtgttaatccgatgatcaacattgaacagctctggagagactataacaagtatgaagag

SEQ ID NO: 1720 - DNA, 1836 bp, Homo sapiens
  full length sequence of bloodCirc_13631
agctgcagagatcctttggttccttgtgcttgctgctttgttccagacctggaggccccccgcaccctcaatcccttcactcatgacttggagcaactttcattccctctgaaataaaacagtgcttaggccagtacctagtctgtttccaactgtgcggtaaatgcctattaaatggccgttgttattatagctttgagattacagtagctagagattagagaagcctctggaaccacctggctgaaggactcaggagccattcaacttgtattcagtaaaaagcctggactgcaagtatatggagaggatgtcaggcttgggtgtagatgggtggggaactctgagccatgtaaactagaacaagagaacatgtttcctgccttctgtttttgagaattgttatatataatgtgagattaagagggcaagccctggagttggacttctgggttcaaatcccagctccaccatcttgttagctgtgcaatgggcaaatgtacttaatttctctgtgcctcaatttctccattagtaaaataacataccaaccttacaagattgttgtaaagattaaatgagttaatacaaataaaaggtttacatcagtgcctggtatgtgctgctattcttattctagagtctgctctattccattccacattcctgggaacgaatatatagggatttctcttcttcaccatcctcacccagcagaggagggagctgagcacagaaatgtgaaataaatctcagagtccttgaaagtttgtctcagctagaatccaggtgatctaagcctggaggagcctgggccacaagtgagacagagttagagttgtccagaagacctgagtttgactcccagttttaccacttgacttattttgatcttgcgcaagtaacctagtctctgagccttagttttctcatatgtaaaatacagaacaaattccttcttgtgtctcttgtatgtacctcattctccttatgactccactctagctatattattagtcttcttgttccttaaacataccaaggcctcagggcctttgtacttgctattctctccctggaacactcttccctcagatcttttcatgtcttaccccagacttcattcaaatctctctggatgtgaccctttgtagaggcccctccctgaccattttatctaaaatagacttcacccttaccttttgtcattctttatttccttaccttgctttgcttcccttccctccctctccctttccctccccttccctccccttcctccccccctttttttgagatggattctcactcttgtcacccaggctgtagtgcagtggcacgatctcgctcactggaacctccgcctcccaggttcaagcgattctcctgcttcagcctcccaagtagctggggttacaggcgcccaccaccatgcctggctaatttttttttttttttttttttgtatttttagtagagacagggtttcaccatgttggccgggctcgtcttgaactcctgacttcaggtgatccatccccctcggcctcccaaagtgctgagattacaggcatgagccaccgcgccaggcgtgccttatttttctttatggcacttagcactacttgaaattatatactgtaaataattgacctgtcttttgctaggatgcaaaatgtgtgagggcaggaattttgaatgcctgctgcctgttctgagcagcacccctaatggacttctctctctattgtaggtgagccctattcccagaggcaggtggtgctgaccctgtaacccaaaggaggaaacagctggctaagctcatcattgttactg

SEQ ID NO: 1721 - DNA, 269 bp, Homo sapiens
  full length sequence of bloodCirc_21883
atcttggagtctctgtggatcgttatgagccggaatgtgagcctgctgttcaccactgtcactacactcttgaccatcctcttctacagcgggacagcccttctcaattttgtactctctctgataattttcctgaccacactattttatctattaagttccagtgatgagtactacaagccagtgaagtgggtgataagcctgactccactatctcagccaggtccttcttctaatattattggccagtctgtggaagaagctatcag

SEQ ID NO: 1722 - DNA, 1054 bp, Homo sapiens
  full length sequence of bloodCirc_10514
tgagatggaagattttcgaggtatagcagaagaatcatttccaagctttctcaccaattcattatttggtaacagtgggattttggaaaatgtcactctttcttcaaatcttggcttgcctgttgctgtttctacacttgctagggatagatccagcactgataacaggtatcctgatatccaggcatcttacttagtagaagggagattttcagttccatccgggtcatctcccggaagccagagtgatgctgaaccaagagagaggttacagcttagcttccaggatgatgattctatctctaggaaaaagagctatgtggaaagtcaacgtttgtcaaatgctctcagcaaacagtcagctttacaaatggagacagcaggaccagaagaggagccagccggagctacagaatccttgcagggccaagatctcttcaacagggcttcaccactggaacaagcacaagactcacctattgattttcatttacagtcatggatgaataataaggaacccaagattgttgtgcttgatgctggaaaacattttgaagacaagactctaaagagtgacctaagccacactagcttattagaaaatgagaaacttatcttaccgacaagcttggaagattcttctgatgatgatattgatgatgaaatgttttatgatgatcatttggaggcttattttgaacaactggcaattccaggaatgatatatgaagacctagaaggaccagaacctccagaaaaaggttttaagttacctacaaatggtcttagacaggcaaatgaaaacggtagcttaaactgcaagtttcaatcagaaaataacagctctctgatttccctcgactcacactcttctgaaacaactcacaaagagtctgaggaaagccaagttatttgtctacctgggactagtaattctataggtactggagatagtagaaggtacacagatggtatgttaccattttcctctggtacttggggaactgagaaagaaatagaaaatttgaagggtattgttccagatcttaacagt

SEQ ID NO: 1723 - DNA, 326 bp, Homo sapiens
  full length sequence of bloodCirc_15292
agactgtatacaatttgagagaagagaatagacaactaaggaaagcacaccaagacatacatacacagcttcaagatgtcaagcaacagcataagaatttactctccgagcatgaacaacttgtagtgactttggaagaccacaagagtgcactagctgctgcacagactcaagttgcagaatataaacaactgaaagatactctgaataggattccaagccttcgaaaacctgatccagcagaacagcaaaatgtgacccaggtggcacattctccacaaggttacaacacagcaagggagaagccaacccgagaggtgcaggag

SEQ ID NO: 1724 - DNA, 559 bp, Homo sapiens
  full length sequence of bloodCirc_09077
gagtgtttctcaggagctatcagaaactatcctcaccatggtagccaattgcagtaatgttatgaataaggccagacaaccaccacctggagttatgccaaaaggacgtcctcctagtgctagcagcttagatgccatttctcctgttcaggtaaatgagtgctacatttgatacatcttcatttgccatagatttggaatagaataagctcctatgtcattaataaattgtctgaatttattacattttagataactgcatgtctagcatccacttattttaaaggagatatgtaaataggcattgtagttaacaatagattttatcatcaaatagaacgtgactctaagaggaaatatacagacaatttatttaggtaaatgaagagggtttctttttaaaatatgaattacgtagactcttgagacataagcactgcctttgaacctgatgtgtcttgtttgtagcttcacgggccaagcaacagtgctagagcataacgacttgttataactggggctcttcagctctcaactgaactgctcttttaaaaacaag

SEQ ID NO: 1725 - DNA, 328 bp, Homo sapiens
  full length sequence of bloodCirc_20343
atccgtgattctaactgcaactatgaggcctttatgaacattattaaattgagtgacaatattggagagctagaagcagtcagagataaggcagcagaagaattacagtatcttagatctctagatacagctggtgatgatatcaacactatcaaaaatcaaataaatagcttactattcgtaaagaaggtatgtgactcaagaatacagcgattgcagtcaggcaaagaaataaatactgtgaaacttgcagcaaactttgggaaactttgcacagtccccctggacagcattcttgtagacaatgttgcactacaattttttatgg

SEQ ID NO: 1726 - DNA, 312 bp, Homo sapiens
  full length sequence of bloodCirc_06102
gatttttcaagccacattcaattgataggatgaaaaaatttaagagaaggctatccctcacactccgaggaagtcagactattgatgaatcattgtctgaattggctgaacaaatgactattgaagaaaacagcagcaaggataatgagcctattgtgaagaatggcaggcctccaacgtctcacagtatgcattccttcctccaccagtacacaggatctttcaagaagcccccattgcggagaccacacagtgttattggagggagccttggctccttcatggcaatgcccagaaatggaagcagattag

SEQ ID NO: 1727 - DNA, 1232 bp, Homo sapiens
  full length sequence of bloodCirc_21911
ccgattacacctcaacaagaaggcaactgacaaacagccttatagcaagctcccaggtgtctctcttctgaaaccactgaaaggggtagatcctaacttaatcaacaacctggaaacattctttgaattggattatcccaaagtaagttcagtgttacggttttttgttttgttttgttttgttttgttcccctcatgataaacatttagggattttaacactgtataaggtgaaggtattaaaaattcatgatgatattggcctcataaaatataacctttagtagtagtcatcacagaacagaaataggttgaggaaggggtgtaaattccctttctaaccacctatatgtccgtgtgaagtagagatccctgagtaaaccttctgaaactcagacattgtcaagtgcctggtagtttgaaaataaaaattttcttccataagagctggatatgaacaataggaagaggagacaaggagagggagaaagcagtgttagtggtctgaaatgggttgcagtacagccagaactaaacgtgacttctccggagaaactggctttgagccaagaatagattacagttagtggtactgtagggtttcatcttacctcatttttaatttccttactgttctgattttaatagctaattgtattgcttataccatttatctatataatctgtatatctgtaaactcagtgtactcccttaattggagaccttccagttttcttgagatgaaagtattctttttatcactttgctttagtagtccacctgtagtttcttaggataacttaatattctttgatttttgtacttagctttacagcagctttgtattaaattgcttgagactgcttttgaaagggcattttggtggtaacagatcacttgtgagaagaatgtgtctttaagcttctacccacttgactttcagtacagtttagttttccctttgcggtctctattcacttgcctcaatttttaccctattgcctcagtttttccatagctgtttttgctactgggagagtcgtccctcttaatttttttggacagggtagctcaaataatcagaaggaagatgatatgcgcactacacttcttatggtgactggttttcatgctcttatttcttttcttttagcctttatttttctcggtagcaccaatgaaaagaatagagaagacacagatgtgatagccttaatgcagcacttattaa

SEQ ID NO: 1728 - DNA, 275 bp, Homo sapiens
  full length sequence of bloodCirc_16667
gcagtagatcatctaatgcaaaattgccctcagttccaacagttgattcagtttcacaagatccggtttcaaatatgagtattacagagaggcttgaacacgctttggaaaaggcagctcctctccttcgtgagatttttgtggattttgcaccttttctttctcggacacttttgggtagccatggacaagaactgcttatagaaggaacaagtctggtttgcatgaagtcgagtagttcagttgtggaattggttatgctactgtgttctcag

SEQ ID NO: 1729 - DNA, 265 bp, Homo sapiens
  full length sequence of bloodCirc_08476
gtggcacaagatctctgtaaagtagcaggcatagcaaaagttctggtggctcagcatgatgtgtacaaaggcctacttccagaggaactgacaccattgattttggcaactcagaagcagttcaattacacacacatctgtgctggagcatctgccttcggaaagaaccttttgcccagagtagcagccaaacttgaggttgccccgatttctgacatcattgcaatcaagtcacctgacacatttgtgagaactatttatgcag

SEQ ID NO: 1730 - DNA, 484 bp, Homo sapiens
  full length sequence of bloodCirc_02444
gttgaagaaatatggagatcaacacaaaactgctcatcagtgttacctgtatcagctttttcacctttcagcttcttttctactttgtaagttactggttttcagcaaaagtttctccaggtttcaatagtctcagcttcaaaaagaagattgaatggaactcaagggtagtatccacatgccattctttggtggttggtatttttggcctgtacattttcttattcgatgaggctactaaagctgatccactttggggtggtccatcacttgcaaacgtgaatattgctattgcctcaggctacctcatttctgatttgtccattataattttgtattggaaagtgattggtgacaaattttttataatgcatcattgtgcgtccctgtatgcatactaccttgtactgaaaaatggagtgctggcatacattgggaattttcgcctgcttgcagagctttccagcccgtttgtgaatcagcg

SEQ ID NO: 1731 - DNA, 176 bp, Homo sapiens
  full length sequence of bloodCirc_17034
tgatctagaacaacttcgaaaaatcagacgacgaagtccccatgaagatactgagtcttttactgtatacttgagatcagatgtggaagcaaaatctttggaagtttggggaagccctgaagctcttgccagagagaaaaaattgcgtaaggaagcagaaatagaatacagagaaa

SEQ ID NO: 1732 - DNA, 273 bp, Homo sapiens
  full length sequence of bloodCirc_00281
gtgacagagttagtccttgataattgcctgtgtgtcaatggggaaattgaaggcctgaatgatactttcaaagaactagaatttctgagtatggctaatgtggaactaagttcgctggcccggcttcccagcttaaataaacttcgaaaattggagcttagtgataatataatttctggaggcttggaagtcctggcagagaaatgtccaaatcttacctacctcaatctgagtggaaacaaaataaaagatctcagtacagtagaagctctg

SEQ ID NO: 1733 - DNA, 566 bp, Homo sapiens
  full length sequence of bloodCirc_03999
gtacacctgagagcctggcagaaaaagaacggcagctctccaccatgattacccagctgatcagtttacgggagcagctactggcagcgcatgatgaacagaaaaaactggcagcgtcacaaattgagaaacaacggcagcaaatggaccttgctcgccaacagcaagaacagattgcgagacaacagcagcaacttctgcaacagcagcacaaaattaatctcctgcagcaacagatccaggttcagggtcacatgcctccgctcatgatcccaatttttccacatgaccagcggactctggcagcagctgctgctgcccaacagggattcctcttcccccctggaataacatacaaaccaggtgataactaccccgtacagttcattccatcaacaatggcagctgctgctgcttctggactcagccctttacagctccagaagggtcatgtctcccacccacaaattaaccaaaggctaaagggcctaagtgaccgttttggcaggaatttggacacctttgaacatggtggtggccactcttacaaccacaaacagattgag

SEQ ID NO: 1734 - DNA, 531 bp, Homo sapiens
  full length sequence of bloodCirc_22667
tttaaggaagaaatctctaaacgttttaaatcacatactgaccaacttgtgttgatatttgctggaaaaattttgaaagatcaagataccttgagtcagcatggaattcatgatggacttactgttcaccttgtcattaaaacacaaaacaggcctcaggatcattcagctcagcaaacaaatacagctggaagcaatgttactacatcatcaactcctaatagtaactctacatctggttctgctactagcaacccttttggtttaggtggccttgggggacttgcaggtctgagtagcttgggtttgaatactaccaacttctctgaactacagagtcagatgcagcgacaacttttgtctaaccctgaaatgatggtccagatcatggaaaatccctttgttcagagcatgctctcaaatcctgacctgatgagacagttaattatggccaatccacaaatgcagcagttgatacagagaaatccagaaattagtcatatgttgaataatccagatataatgagacaa

SEQ ID NO: 1735 - DNA, 400 bp, Homo sapiens
  full length sequence of bloodCirc_22261
agaaaaacagaaatctgaagctaaagacagaaaagttctagaaattctgcaagtcaaggatgccaaaatacaagaatttgaacagagagagtcagtactgaaacaggaaataaatgaccttgtaaaacggaaaattgcagtagatgaagaaaatgctttcttaaggaaagaattcagtgacttggagaagaaatttaaagataaaagtcaagaaattaaggacactaaggagtgtgtacagaacaaagaagagcaaaacagactagttataaaaaatctggaggaggaaaacaagaaattaagtacccgctgcactgacctgctaaatgacctggagaaattgaggaagcaggaagcacatttgagaaaagaaaaatatagcactgatgcaaaaataaag

SEQ ID NO: 1736 - DNA, 220 bp, Homo sapiens
  full length sequence of bloodCirc_10952
ggatttgtcttggctgttactatgacacgggaagcaattgatgaatttcggcgttttcagcgtgacaaggaagtgaattcacaactatatagcaagcttacagtaagaggtaaagtgcaagttaagagttcagacatacaagttggagacctcatcatagtggaaaagaatcaaagaattccatcggacatggtgtttcttaggacttcagaaaaagcag

SEQ ID NO: 1737 - DNA, 307 bp, Homo sapiens
  full length sequence of bloodCirc_19236
aaaagagtctcatcgtggaaggcaagagggaaaagaaaaaagtagagaggttgacaatgcaagtctcttccttacagagagagccatttacaattgcacaaggaaaggggcagaaactttgtgaaattgagaggatacatttttttctaagtaagaagaaaaccgatgaacttagaaatctacacaaactgctttacaacaggccaggcactgtgtcctcattaaagaagaatgtgggtcagttcagtggctttccatttgaaaaaggaagtgtccaatataaaaagaaggaagaaatgttgaaaaa

SEQ ID NO: 1738 - DNA, 180 bp, Homo sapiens
  full length sequence of bloodCirc_13408
gggacaggcaaatggtatgaattacaagacctccaggtgactgacatccttccccagatgatcacactgtcagaggcttacattcagatttggaagaggcgagataatgatgaaaccaaccagcagggggcttgaaggaggcgtctagggctttgctcccaagggctgtggctgatgatg

SEQ ID NO: 1739 - DNA, 364 bp, Homo sapiens
  full length sequence of bloodCirc_07053
gaaaacggacgatgtattactaagctggaaaacatggggtttcgagtgggacaaggattgatagaaaggtttacaaaagatactgcaaggttcaaggatgagttagatatcatgaagttcatttgtaaagatttttggactacggtattcaagaaacaaatcgacaatctaaggacaaatcatcagggcatctatgtacttcaggacaacaaatttcgcctgcttactcagatgtctgcaggaaaacagtatttagaacatgcatctaagtatttagcatttacgtgtggcttaatcagaggtggcttatcaaacttgggaataaaaagtattgtaacagctgaagtgtcttcaatgcctgctt

SEQ ID NO: 1740 - DNA, 361 bp, Homo sapiens
  full length sequence of bloodCirc_04125
tttacctaaagcagtaaaaagaagaattaatgcattgaaacaacttcaggtgagatgtgctcacatagaagccaagttctatgaagaggtacatgacttggaaagaaagtatgcagcgctataccagcctctctttgacaagagaagagaatttatcaccggcgatgttgaaccaacagatgcggaatcggaatggcacagtgaaaatgaagaggaagagaaattggctggagacatgaaaagtaaagtagtcgtcacagaaaaagcagcggcaacggctgaagagccagatcccaaaggaattccagagttctggtttaccatcttcagaaatgtggacatgctgagtgaattagtccag

SEQ ID NO: 1741 - DNA, 234 bp, Homo sapiens
  full length sequence of bloodCirc_09176
gctgtcattatttgtatcaaaaacaaagaatttgaaaaggcttcaaaaattttgaaaaaacatatgtccaaggaccccacaactcagaagctgagaaatgatctcctgaatattattcgagaaaagaacttggcccatcctgttatccagaacttttcatatgagaccttccagcagaagatgctgcgcttcctggagagccacctggatgacgccgagccctacctcctcacg

SEQ ID NO: 1742 - DNA, 418 bp, Homo sapiens
  full length sequence of bloodCirc_20988
tccaatatcagatggaaatgatgcggagccttcgccatgtaaacattgatcatcttcacgtgggctggtatcagtccacatactatggctcattcgttacccgggcactcctggactctcagtttagttaccagcatgccattgaagaatctgtcgttctcatttatgatcccataaaaactgcccaaggatctctctcactaaaggcatacagactgactcctaaactgatggaagtttgtaaagaaaaggatttttcccctgaagcattgaaaaaagcaaatatcacctttgagtacatgtttgaagaagtgccgattgtaattaaaaattcacatctgatcaatgtcctaatgtgggaacttgaaaagaagtcagctgttgcagataaacatgaattgctcagccttgccagcag

SEQ ID NO: 1743 - DNA, 364 bp, Homo sapiens
  full length sequence of bloodCirc_18339
aatgttggctcaattaagaaacatcagggagataaattcaacccagtgtgtctaaaaatgactacaaaacgaagtttgtttgtgcggttggtaccatgtcgctgtctacgaggggaagaggagactgtcactactcttgattattctcattgcagcttagaacaagttccgaaagagatttttacttttgaaaaaaccttggaggaactctatttagatgctaatcagattgaagagcttccaaagcaactttttaactgtcagtctttacacaaactgagtttgccagacaatgatttaacaacgttaccagcatccattgcaaaccttattaatctcagggaactggatgtcagcaagaatg

SEQ ID NO: 1744 - DNA, 1037 bp, Homo sapiens
  full length sequence of bloodCirc_16176
cacttttccagccattaactccaggctctcgagaatttgaagatgttgtaaatattctccattcttcttaccttgaaccaacctcagtaacaaattttaactacagacgtgcttgcttggtacacaatgagcttttggaaaaggagtttacagaaaagcgaagagaactgaagtttgatggtcgtttagataaggaactttcagaatcctatgcatttctgatggttgatcgataccaggttcaaaccatatgtgaaaaaggattacatgtgggtcagtccaaaataacaattcttggcagtccttccatgggtgtctatctttctaggtatgctgatttattacaagcgaatcctttggacacgggggcaatgggtgatgttgttatttttaaaataatgaagggtaaaataaagagtatatatgaccccatgggtgtaaaaagtttggaatctatgttaaataagagtgctttggaccccacaccaaagcatgaatgtcacgtgtcaaagaatgccaatcgaattacatcacttttggcttacagagcctatgagcttactcagtattatttttatgagtatggctttgatgagctaaggcgaagaccaagacacgtttgtccatatgcagttgtgtcttttacttacaaagatgatatacaaactccgaagtttgtaccttcatcaagatctaacagctttaatacagatagaaacatagataaatataactataccttgtggaaaggacagcttttaaataaaggaaaacttttgtgttatatttctctgaggtcagccactcgtgcttttttgcctatcaaactacctgagaaattagatgttgaaacagttatgagtattgatcatctgaaacagaaaatccctccagcactgttttataaggaaacatacttaggtccaaatgaagttttgaagaatggaatgtattgcagcctttatgaagttgtggaaaagacaagaattggaagtaacatggagagtttactgcaaaaactagacagagaaaaactt

SEQ ID NO: 1745 - DNA, 215 bp, Homo sapiens
  full length sequence of bloodCirc_11220
gaagaaggtagataatgactataatgcccttcgagaaagactcagcaccttgcctgataaattgtcttataatataatggtaccatttggcccttttgccttcatgccaggaaaacttgtccatactaatgaagtcactgttttactgggggacaactggtttgcaaagtgctcagcaaagcaggctgtaggtttagttgagcaccggaaagaac

SEQ ID NO: 1746 - DNA, 208 bp, Homo sapiens
  full length sequence of bloodCirc_14276
gatcaagaattggttaaaatagttggaatacgatatgaagttgggccccctacactctgttgcctaaaactagcatttatagatccagcaactggaaaacttatggacaaatctttctctattagatatcatgatatgccagatgttattgactttcttgtattgcgtcaattttatgatgaagcaagacagaggaattggcagtctt

SEQ ID NO: 1747 - DNA, 242 bp, Homo sapiens
  full length sequence of bloodCirc_11806
gatttgaatttgttgaaatgagcagtcgtaaatcaaagagtaacagcttaattcacacagagtgcctttcacaggtacaaagaattttacgtgaaagattttgtcgtcagagtccacatagtaacctatttggagtgcaagtacaatacaaacacttaagtgagctgctgaaaagaactgctctccatggagagagtaactctgtccttattatcggaccccgaggatcaggaaaaactatg

SEQ ID NO: 1748 - DNA, 300 bp, Homo sapiens
  full length sequence of bloodCirc_07606
gataacagtcttgctgaagacaatctgaaacttaaaatgcgtatcgaagttttagaaaaagagaagtcattactgagtcaagaaaaggaagaacttcagatgtcacttttaaaattgaacaatgaatatgaagtaattaaaagtacagctacaagagacataagtttggattcagaattacatgacttaagacttaatttggaggcaaaggaacaagaactcaatcagagtattagtgaaaaggaaacactgatagctgagatagaagaattggacagacagaatcaagaagctacaaag

SEQ ID NO: 1749 - DNA, 280 bp, Homo sapiens
  full length sequence of bloodCirc_17751
gaattgaatgatctggcacgggaccctccagcacagtgttcagcaggtcctgttggagatgatatgttccattggcaagctacaataatggggccaaatgacagtccctatcagggtggagtatttttcttgacaattcatttcccaacagattaccccttcaaaccacctaaggttgcatttacaacaagaatttatcatccaaatattaacagtaatggcagcatttgtcttgatattctacgatcacagtggtctccagcactaactatttcaaaag

SEQ ID NO: 1750 - DNA, 937 bp, Homo sapiens
  full length sequence of bloodCirc_07232
ataacatagatcatcagtagaaaacttcttgaagttgttcaagaaaaatttgaaagtagcaaaatagaaaataaagaattaacagcagatacagaggacagcatggaagtgttgtcttaggaaacagaacacagcagtgaaaaaacagacaaaatccgctcagatacaactgcagctgataatgttttccggcttcaatgtctttagagttgggatctcttttgtcataatgtgcattttttacatgccaacagtaaactctttaccagaactgagtcctcagaaatattttagtacattgcaaccaggaaaagcctctttagcttatttttgtcaagctgattccccaagaacatctgtatttcttgaagaactgaatgaggctgttagacctctgcaggactatggaatttcagttgccaaggttaattgtgtcaaagaagaaatatcaagatactgtggaaaagaaaaggatttgatgaaagcatatttattcaagggcaacatattgctcagagaattccctactgacaccttgtttgatgtgaatgccattgtcgcccatgttctctttgctcttctttttagtgaagtgaaatatattaccaacctggaagaccttcagaacatagaaaatgctctgaaaggaaaagcaaatattatattctcatatgtaagagccattggaataccagagcacagagcagtcatggaagccgcttttgtgtatgggactacataccaatttgtcttaaccacagaaattgcccttttggaaagtattggctctgaggatgtggaatatgcacatctctacttttttcattgtaaactagtcttggacttgacccagcaatgtagaagaacactaatggaacagccattgactacactgaacattcacctgtttattaagacaatgaaagcacctctgttg

SEQ ID NO: 1751 - DNA, 353 bp, Homo sapiens
  full length sequence of bloodCirc_00197
ggaagaggaagaacgtctgagaaataaaattcgagctgatcatgagaaggccttggaagaagcaaaagaaaaattaagaaagtcaagagaggaaattcgagcagaaattcagacagagaaaaataaggtagtccaagaaatgaagataaaagagaacaagccactgccaccagtccctattcccaaccttgtaggaatacgtggtggagacccagaagataatgacataagagagaaaagggaaaaaattaaagagatgatgaaacatgcttgggataactataggacatatgggtggggacataatgaactcagacctattgcaaggaaaggacactcccctaacatatttg

SEQ ID NO: 1752 - DNA, 467 bp, Homo sapiens
  full length sequence of bloodCirc_18265
tttcagagtggcagaatcacaccaccccgaagagccccttcaccagatggcttctcaccatatagccctgaggaaacaaaccgccgtgttaacaaagtgatgcgggccagactgtacttactgcagcagatagggcctaactctttcctgattggaggagacagcccagacaataaataccgggtgtttattgggcctcagaactgcagctgtgcacgtggaacattctgtattcatctgctatttgtgatgctccgggtgtttcaactagaaccttcagacccaatgttatggagaaaaactttaaagaattttgaggttgagagtttgttccagaaatatcacagtaggcgtagctcaaggatcaaagctccatctcgtaacaccatccagaagtttgtttcacgcatgtcaaattctcatacattgtcatcatctagtacttctacgtctagttcagaaaacag

SEQ ID NO: 1753 - DNA, 210 bp, Homo sapiens
  full length sequence of bloodCirc_04703
aagaatcaaaagaacctgttgctgatgaagaagaggaagacagtgatgatgatgttgaacctattactgaatttagatttgtgcctagtgataaatcagcgttggaggcaatgttcactgcaatgtgcgaatgccaggccttgcatccagatcctgaggatgaggattcagatgactacgatggagaagaatatgatgtggaagcacatg

SEQ ID NO: 1754 - DNA, 690 bp, Homo sapiens
  full length sequence of bloodCirc_22665
tttaaggaagaaatctctaaacgttttaaatcacatactgaccaacttgtgttgatatttgctggaaaaattttgaaagatcaagataccttgagtcagcatggaattcatgatggacttactgttcaccttgtcattaaaacacaaaacaggcctcaggatcattcagctcagcaaacaaatacagctggaagcaatgttactacatcatcaactcctaatagtaactctacatctggttctgctactagcaacccttttggtttaggtggccttgggggacttgcaggtctgagtagcttgggtttgaatactaccaacttctctgaactacagagtcagatgcagcgacaacttttgtctaaccctgaaatgatggtccagatcatggaaaatccctttgttcagagcatgctctcaaatcctgacctgatgagacagttaattatggccaatccacaaatgcagcagttgatacagagaaatccagaaattagtcatatgttgaataatccagatataatgagacaaacgttggaacttgccaggaatccagcaatgatgcaggagatgatgaggaaccaggaccgagctttgagcaacctagaaagcatcccagggggatataatgctttaaggcgcatgtacacagatattcaggaaccaatgctgagtgctgcacaagagcag

SEQ ID NO: 1755 - DNA, 216 bp, Homo sapiens
  full length sequence of bloodCirc_19216
gcaccagttagaagacaaatgaaagctaagcaactcagtgcacaatcttacggtgtgaccagttcaacagctcggcgaatattgcagtctttagagaagatgtcaagccctttagcggatgcaaaaagaattccatccattgtttcttctcctctgaattctcctcttgataggagtgggatagatatcacagattttcaggccaaaagagaaaag

SEQ ID NO: 1756 - DNA, 1021 bp, Homo sapiens
  full length sequence of bloodCirc_17361
tttgtacaatgacgacagaaacctgcttcgaattagagagaaggaaagacgcaaccaggaagcccaccaagagaaagaggcatttcctgaaaagattcccctttttggagagccctacaagacagcaaaaggtgatgagctgtctagtcgaatacagaacatgttgggaaactacgaagaagtgaaggagttccttagtactaagtctcacactcatcgcctggatgcttctgaaaataggttgggaaagccgaaatatcctttaattcctgacaaagggagcagcattccatccagctccttccacactagtgtccaccaccagtccattcacactcctgcgtctggaccactttctgttggcaacattagccacaatccaaagatggcgcagccaagaactgaaccaatgccaagtctccatgccaaaagctgcggcccaccggacagccagcacctgacccaggatcgccttggtcaggaggggttcggctctagtcatcacaagaaaggtgaccgaagagctgacggagaccactgtgcttcggtgacagattcggctccagagagggagctttctcccttaatctctttgccttccccagttccccctttgtcacctatacattccaaccagcaaactcttccccggacgcaaggaagcagcaaggttcatggcagcagcaataacagtaaaggctattgcccagccaaatctcccaaggacctagcagtgaaagtccatgataaagagacccctcaagacagtttggtggcccctgcccagccgccttctcagacatttccacctccctccctcccctcaaaaagtgttgcaatgcagcagaagcccacggcttatgtccggcccatggatggtcaagatcaggcccctagtgaatcccctgaactgaaaccactgccggaggactatcgacagcagacctttgaaaaaacagacttgaaagtgcctgccaaagccaagctcaccaaactgaagatgccttctcagtcagttgag

SEQ ID NO: 1757 - DNA, 291 bp, Homo sapiens
  full length sequence of bloodCirc_09584
catcagcgagagctttctaactgtcaaaggtgctgccctttttctaccacggggaaatggctcatccacaccaagaatcagccacagacggaacaagcatgcaggcgatctccaacagcatctccaagcaatgttcattttactccgcccagaagacaacatcaggctggctgtaagactggaaagtacttaccagaatcgaacacgctatatggtagtggtttcaactaatggtagacaagacactgaagaaagcatcgtcctaggaatggatttctcctctaatgacag

SEQ ID NO: 1758 - DNA, 6317 bp, Homo sapiens
  full length sequence of bloodCirc_06777
aagggatcaagttctgttcaggaagatttgaaacatagtgtaaagttgttgctgttttaaacttgtaaacctgattcttctcatgtgggaggtacgtaagtaggcctctcagatttcaggttggttctctgcctggtagatacaagggcaaaactattctggaaccatattgatgttaaaaaaattttttacggacttcctgccggcaaggatttttttaaaagattttttaaatgtgtctaagaaatgttttaatttgtcttctgattatacagtgatttacaattcatgcttcttttatatgtgggcaaaattaagaactaatatgtaaaacaaaatggagcacattcccatttttcttattgctttgagttgatatggcccctatgtcagtagtgctttggctgaacgtcacaaagacctaacacagtgccctaaacaaatagggggtttgtttttctccaaaaagaaatttggggtagggtgcggtggctcacacctgtaatcccagcactttgggaggccaaggcgggtggatcacgaggtcaggagatcgagaccacggtgaaacctcgtctctactaaaaatacgaaaaaaattagccgggcacggtggcgggtacctgtagtcccagctactcgggaggctgaggccagagaatggcgtgaacccgggaggcggagcttgcagtgaatcgagatggcgccactgcactccagcctggggcaacagagtgagactccatctcaaaaaaaaaaaaagaaaaaaaaaaaaaagaaaggaatttggaggtatgcagcgtctagctttggatcagcagttcagtaatattggagttggtggtattttaaggtagttttgtcttttctgtcatgtttgagaccctgtagctacaggataatgttttacagttacagctacatggttgcattcaaggaaggaggaaggaactgtactggcaactctgtccttacccccccaccctccttttttttttttgagatgaagtttctgtcactcaggctggagtgcagtggcggaatctcagctcactgcaactgtcgcctcccttgttcaagcgattctcatgcctcagtcttctgagtagctgggattacaggcatgtgccaccatgcctggctaatttttgtacttttagtagagatggggtttcaccatgttggccaggcaggtctcaaactcctgacctcaggtgatctgctagccttggcctcccaaagtgctgggattacaggtgtgagccacagtgcccggcctccccttttatgataaacaaaggcattaccaacccctaccccctactacattgccacctagtagactttaactaatgagaactggccagaactaagccagatggctatctctagctgcagagaagtttgggaaaacaagtatttggccaatgtggtctccctaaacacgtgttcaacttcttgaagaaggaaatctcatgtctttggctgtattcagcatttttcagtagcagttacatattctagttttcatggtggatgaagtggtaccagcttagttccacaggagggagaagaatcaggactcatttaatccataagaattaaactcagcagcttttgagtacccattatgtgcatagtctgccatgaaatattataaagtagtccaggtatggtggcttacacctgtaatatcagcactttgggagaataagacaggaggattgcttgaggccagagtttgagatcagcctgggcaacatagtgagatcctatctctacaaaaaattaaaacatcagccatgtgtggtgtacgcacctgtagtaccagctactaaggaggctgaggtgggatgatcccttgagtccaggagttcgaggctgcagtgaggtatgatcgatcacactactgtactccagcctgggcaacagaacgagaccctgtctcaaaaaaaaaaaaaaaaaaaagttatcaaagaattatataacattttgtgtgtgtgtgtgtgtgtgtgtgtgtgtgtgtgtgtgtatgcaggttgtttattggctccttaggaagaaaaaaatacgtgtatgaaataattgattaacagtacaagaactcataattatttgtttaaatgtttaatgttggtactgagtgctgtggcataggaatagggaactttttcttagggtcggtgatggattcttgggaaaataaaatgaagggcaaatggaagcaaaagacaatttaatttgcttctgttttaagggaacttttaaaaagttaattcttaaattttttaatttaaggacttcgtcaagaaacatcgaattaaatatattgagtttaaccctaacaagcatcagatctttcagtctgctgtatgaggaaatacaagtttctttctgctttctattatgattgttgatttgcatgagcgtgttttaggttaggctgtgttatgctgtggtaatacataccaccaacatcctcatgatttaacacaataaaaaacttctgctcacaccaagtctgcttgagggctcattggctccgtggaaactgatctccatgtccaggccagtttggtcttgtggccgtccgttttagggcagtgcttagggtcaggagagcaaaacacagggctggagagttaagcacaggcaactaaatgcttcagcatgggaatggcattcattttcactcacaggatgtgttcagcttagtcacatggctgtctatgcctaacctcaagggaagggagtgcagtcctccaggaactcagatgtaaaaaagccagtatgatggatatagtattgtctacaaaaaaaagtagcataatagagttagatacaagcaaagtactctaggatcccagtaaggagaagtaagaaattctgatgagatgcagggagagccttagaagggttcatgaagatggtgacagatgatacaaactcagtagaatgagcaggtttttcttagatttgaagagaagaaaggacattcaaactaagggaacaacactgactgagtcagagctagactcaaagctagagtctactggctgatgtcgtgggagaggaagaagagatgagcgggccttgaattcgtttaacattcagcaaaaatgtattgcatgtctaccatgtgttaggcactgtttcaggtttggggaatatctgataatgaacaaaacacaaaaagcctgtccttgtgaaggttacatgctagtggaagaagcgctaaggagttagtattttattataagcacactggtgagtaagcaaagataggaacattggatgcctgtgaatcttaagattttcctggccgagcgcggtggctcatgcctgtaatcccagcactttgggaggctgaggtgggtagatcacttaaggtcaggagttcgagactagcctggccaacatagtgaaaccctgtctctactaaaaatacaaaaattagccgggtatggtggcgcgcacctgagtcccagctactcatgaggctgaggcaggagaattgcttcaacctgggaggcggaggttgcagtgagctgagattgcgccactgcactccagctgacagagtgagactccatctcaaaaaaaaaaaggatttttctaagatttctattttacattaaatagaaggcagttggtttgcatgaaaattattatttcatcaatttgactgcctcattatagaaaacacatattgaagtcaaataaaacgtagagatgaatctctgaagttaaaatatgttatttgggacgcaagaattgcaatttggggcacacagaccacagggtggtcttcagtatgtatgaagaacaaagtaaaggatggaggttttataaagagaagtgttacatattttgaaagacaggtcattggcactagtaaagttttggggaggtggcaagccctgattggtgagtgacagtggtgggtaatactggtcttagagtcagcaacaagttgtttcagtagccattagataaactggtttcaggttacaataggcagtttcagcagccaggcttacagagaattataatcttggagcaatgttacatccctccccctcccctggccccccaccccatccctgcccctcagctctgatttagttgagtacgaataggatgacccaattagtatgatcagctttcacacatgaaggttgaatttatgaaacatgtaaatttgaaaatacatgtttacattgcaaaaagcttttttaacaaaaattttggccagtagtataaattcagtgaatatgttttcattgcacagatagtaaaaccacttgatacatacctcatggggatatggactgctttatgcgctgctttttaccacaccttaaatagtgcctggttgtgtgtgtgtgtgtgtgtgtgtgtgtgtgtgtgtgtgtgtgtgtgtaactcagtaaatattcaatgaatgaatgaagaaattcagaagataaaaaagagaaatttcccttatttttaaccttctgaacactatagtggttagcatttatatcatttattcagccattctaatatttattgagtagcagttttgtaccaactgctgttctaagatataaggaataataaattcctgttactgttttcatgaaacttaaattctagtgtaattaaaatcatgtagaaataaacataaacatgatcacccagcttcttttaaaactagactgcagttgatgtaataatttgcattacaacagcatgcatcttgtgcacaacaaaatctacctgtttttgtattaaagccttagtgtcaaagctttattatcattttagtcttttatcaactccatatttataaatggtctattttcccaaagttctaatatggaaatcagaatcatttttgttagaggaacaatgtttacaagttgcctagatttgcagtgaggtcataaaaagcctgtttaatctaaaatagacatttgcaataaaaacagaaattgttgttgagatgccatattatgtgataactgagtaaaacagacaagagcctatcccctaacctggtatgtgaatgtgaaaatattagagaaataatgaagaagtagatggagactaatgaggaaattctgaaaaggacatcttttgagaaattcagaggtagatggcgcaagttttaaagcttactttcactttaaaacacctgagtttcatttcctttgatttgagtaaattacaaagcagtttattagttaaatcaggcttgttttgatttataggtatatagagaaagacaggacattttcctggacagaaagttggaaaagagaaacgtgtaaagggggtggaaagtggctgtgagtgcatgtggaatgagaagcctcccttgggcaggagttaacagccacaatggggaaaggattgggacatctaatcctttgagtgtgtgtgggggccaagggagcagtagtagcaggatgcctgcgcatacagccatgtacacagtgtgtacacagaagtgtaattcttgggcctgaatatttcatagggtagagacatattgagtactttattaagtaagcatattgagtactttattcatctatacaacaagggtcgtctattaagggccacacagtctagctgtttctgtaaagcacattgttttgaattactgttagcagtgtagtatagaaggaaatcgggaatccagattctctatggatttccccctgaacagttatgtggctgtatccttatctagtgaatggtgacattagcttttcccctgctgcacgggctgtagtgaggctcaggtgtgcaggtgcacttactaacatatggaaaagttaagcactgtataaccagaaggtagcccttttactcctattttatatgacagccacgtatgcaaaatatctaatttcttcctgaacactcaattgaacttcaacacttcgtatttttcgtctcagaatttttattttcctcaaatttatattatgtggttaaattcctttgaagtgctagatactttaagattaaaattaaagtaggaatgttttttcttcaattagaagctcttagaacttggcaagtactctgtgttctctcatttccttatctttgtgtatgctgtattgcagcacacgtcacatggagatgggcgtcaagaagttacctctcgtaccagccgctcaggagctcggtgtagaaactctatagcctcctgtgcagatgaacaacctcacatcggaaactacagactgttgaaaacaatcggcaaggggaattttgcaaaagtaaaattggcaagacatatccttacaggcagagag

SEQ ID NO: 1759 - DNA, 427 bp, Homo sapiens
  full length sequence of bloodCirc_21042
gttcctgattatgtcactgtaataaagcaaccaatggacctttcatctgtaatcagtaaaattgatctacacaagtatctgactgtgaaagactatttgagagatattgatctaatctgtagtaatgccttagaatacaatccagatagagatcctggagatcgtcttattaggcatagagcctgtgctttaagagatactgcctatgccataattaaagaagaacttgatgaagactttgagcagctctgtgaagaaattcaggaatctagaaagaaaagaggttgtagctcctccaaatatgccccgtcttactaccatgtgatgccaaagcaaaattccactcttgttggtgataaaagatcagacccagagcagaatgaaaagctaaagacaccgagtactcctgtggcttgcagcactcctg

SEQ ID NO: 1760 - DNA, 357 bp, Homo sapiens
  full length sequence of bloodCirc_15108
aaaatgcaattcttgacttgagatgaatcagttccccaatttatacttcattcgtggaaactgggtcttgggcaacatctcagcaattccttccaatctgaagttctctcatctgctggtaaccggtccattcctattggcgttcaagcaatcacaaacacatcctacttttgagaaatgttccaaaggaggagtcaaagcggctgtaatcttgattcggttttatgggcaatagaattattttactgattcctggaatcatggctcctatacatctgcactctatgagcactttggaaattaaaggattgccagcttttccactttgggacaaaaaacatttgtgctaaacagccg

SEQ ID NO: 1761 - DNA, 176 bp, Homo sapiens
  full length sequence of bloodCirc_06177
ctgatgtagcccagcagttccagtatgctgtgcgggtgattggcagcaacttcgccccaactgttgaaagagatgaatttttagtagctgaaaaaatcaagaaagagcttattcgacaacgaagagaagcagatgctgcattattttcagaactccacagaaaacttcattcacag

SEQ ID NO: 1762 - DNA, 994 bp, Homo sapiens
  full length sequence of bloodCirc_10983
atccaggatgagaagactgataaaagaagaagctagctgaacagctgtaaaatgcccaaatctgggttcacaaaaccaattcagagtgaaaattctgacagtgacagcaatatggtagagaaaccatatggaagaaagagtaaagacaagattgcatcctacagcaaaactccaaaaattgaacgaagtgatgtgagcaaggagatgaaagagaaatcatccatgaaacgtaaacttccttttactattagcccatcaagaaatgaagaacgagattcagacacagattcagatccaggacatacaagtgaaaattggggggagagacttatatcttcttacaggacatactcagagaaagaaggtccagaaaagaagaagacaaaaaaggaagctggaaataagaaatccacaccagttagcattctttttggttatccactctctgagcgaaaacagatggcacttcttatgcagatgacagcaagagacaacagtccagattccacaccaaatcatccatcacaaacaacgcctgcccaaaagaaaactcccagttcttcatctcgacagaaagataaagttaataaaagaaatgaacgtggtgaaactcctttacacatggctgctattcgaggagatgtgaaacaagttaaagaattaataagtttaggggcaaatgtgaatgtgaaagattttgcaggttggacaccactgcatgaagcttgcaatgttggatattacgatgttgctaagatacttatagcagctggagcagatgttaacacacaaggattagatgatgacactccactccatgattctgctagtagtgggcacagagatatagtaaagctgttacttcgtcacggtggaaatccatttcaagctaataaacatggggagcgtccagtggatgtagcagaaacagaggagttggagttgctactaaaaagagaggtgcctttatctgatgatgatgaaagttacacag

SEQ ID NO: 1763 - DNA, 144 bp, Homo sapiens
  full length sequence of bloodCirc_10604
gatttttgtaattttatccctgataattcccagctggaatacacacaggagtgcaagactaagaatgccaacattctaggattctgctggactagttcaactgaaattgtcttcataacagatcaaggaatcgaattttaccag

SEQ ID NO: 1764 - DNA, 380 bp, Homo sapiens
  full length sequence of bloodCirc_08542
ctctattatcaagtcctaaattttggaatgattgtctcatcggcactaatgatctggaaggggttaatggtaataactggaagtgaaagtccgattgtagtggtgctcagtggcagcatggaacctgcatttcatagaggagatcttctctttctaacaaatcgagttgaagatcccatacgagtgggagaaattgttgtttttaggatagaaggaagagagattcctatagttcaccgagtcttgaagattcatgaaaagcaaaatgggcatatcaagtttttgaccaaaggagataataatgcggttgatgaccgaggcctctataaacaaggacaacattggctagagaaaaaagatgttgtggggagagccagggg

SEQ ID NO: 1765 - DNA, 638 bp, Homo sapiens
  full length sequence of bloodCirc_02224
ttacagctcttttgaggaagcttaagcagcaatccagggaaagtgttgaagaaaaacgacctcgattattaaaagccctgaaagagctaggtgacttttatctagaacttcactgggattttcaaagctgggtgcctttactttcccgaattctgccttccgatgcatgtaaaatatacaaacaaggtatcaatatcaggcttgacacaactctcatagactttactgacatgaagtgccaacgaggggatctaagcttcattttcaatggggatgcggcgccctctgaatcttttgtagtattagacaatgaacaaaaagtttatcagcgaatacatcatgaggaatcagagatggaaacagaagaagaggtggatattttaatgagcagtgatatttactctgcaactttatcaacaaaatcaatttctttcacgcgtgcccagacaggatggctttttcgggaagataaaacagaaagagtaggaaactttttggcagacttttacctggtgaatggacttgttttagaatcaaggaaaagaagagaacatctcagtgaagaggatattcttcgaaataaggccatcatggagagtttgagtaaaggtggaaacataatggaacagaattttgag

SEQ ID NO: 1766 - DNA, 369 bp, Homo sapiens
  full length sequence of bloodCirc_01705
aaaaagagagaaagactagatggtgaaaacatttatatcagacatagcaatttaatgttggaggatttagacaagagtcaagaggagatcaaaaaacatcatgccagcatcagtgagctgaaaaagaacttcatggagtctgtaccagaaccacggcctagtgaatgggataaacgcttatccactcactcacccttccgaactcttaacatcaatgggcaaatccccacaggagaaggacctcccctggtgaagacacaaactgtcaccatctcagataatgccaatgctgtgaaaagtgaaatcccaaccaaagacgtccctattgtccacactgagaccaagaccatcacttatgaggctgcccag

SEQ ID NO: 1767 - DNA, 205 bp, Homo sapiens
  full length sequence of bloodCirc_07102
gtagttcagctacaggaatggatgattaaaagcatcaataataatactgctatatgtgtagaaggaaaattgatagacgtcactaacatatattggcacagtaatgtaattatagagcggattgagcacaacaaacttaggactatatcaggcaacgtttatatattaaaaggcatgatagaccaaatttccatgaaagaagcag

SEQ ID NO: 1768 - DNA, 312 bp, Homo sapiens
  full length sequence of bloodCirc_04624
gtacgattgcaattatgggacacagcaggtcaagagcggttcaggagcttgattcctagctacattcgtgactccactgtggcagttgttgtttatgatatcacaaatgttaactcattccagcaaactacaaagtggattgatgatgtcagaacagaaagaggaagtgatgttatcatcatgctagtaggaaataaaacagatcttgctgacaagaggcaagtgtcaattgaggagggagagaggaaagccaaagagctgaatgttatgtttattgaaactagtgcaaaagctggatacaatgtaaagcag

SEQ ID NO: 1769 - DNA, 276 bp, Homo sapiens
  full length sequence of bloodCirc_06763
gctgctgacttgagtaaaccaatagataaaaggatatacaaaggaacacagcctacttgtcatgacttcaaccacctaacagccacagcagaaagtgtctctctcctagtgggcttttccgcaggccaagtccagcttatagacccaatcaaaaaagaaactagcaaactttttaatgaggaaaactcttgtcagcacttgtggaaggtggattggaatgaagaaagacagaatgaaggtagcaagaccagtgaggaggctctagtaactgtccag

SEQ ID NO: 1770 - DNA, 304 bp, Homo sapiens
  full length sequence of bloodCirc_00399
gccaagcatggggatcagcacgagggtcagcactacaacatctccccccaggatttggagactgtatttccccatggccttcctcctcgctttgtgatgcaggtgaagacattcagtgaagcttgcctgatggtaaggaaaccagccctagaacttctgcattacctgaaaaacaccagttttgcttatccagctatacgatatcttctgtatggagagaagggaacaggaaaaaccctaagtctttgccatgttattcatttctgtgcaaaacaggactggctgatactacatattccagatg

SEQ ID NO: 1771 - DNA, 303 bp, Homo sapiens
  full length sequence of bloodCirc_10224
gccttttcagatattaatggcaaagttcagaccattgttttgacatctggtacattatcaccaatgaaatccttttcgtcagaacttggtgttacatttactatccagctggaggctaatcatatcattaaaaattcacaggtttgggttggtaccattgggtcaggccccaagggtcggaatctctgtgctaccttccagaatactgaaacatttgagttccaagatgaagtgggagcacttttgttatctgtgtgccagactgtgagccaaggaattttgtgtttcttgccatcttacaag

SEQ ID NO: 1772 - DNA, 323 bp, Homo sapiens
  full length sequence of bloodCirc_16576
ttccaaagaactactggttcagattttagctcttcccaagttgtgaaaatagtgaaggatgcttagactacttaacatacaaactgctttctggttaatcatctttagaagactggatttctggatatctactccactccatctctattgacttttaaaacatgataatgcaaacctataacactggcaaccatcagtgaacctttaatttcattgattaatagcgtttgaagcttcctcagggaataacaatgacatcagcagtggttgacagtggaggtactattttggagctttccagcaatggagtagaaaatcaagag

SEQ ID NO: 1773 - DNA, 878 bp, Homo sapiens
  full length sequence of bloodCirc_16378
actatggaaatggtgtcagacaaaaagcaaattcgagtgattttcttattcaatttaaaaatgggtcataaagcagcagagacaactcgcaatatcaacaacgcatttggccaaggaactgctaacaaatgtacagtggtagctcaagaagttttgcagaggagacgagagccttgaagatgaggagcatagtgaccagccatcagaagttaacaactgccaactgagagcaattattgaagctgatcctcttacaaccacacaagaagttgccaaagagcttgacgtcgaccattccagggtcgcttggcatttgaagcaaattggaaaggtgaaaaagctcaataagtgggtgcttcatgagctgagtgaaaatttaaaaaaatcatcattttgaagtgttgtcttcccttattctatgcaacaacgatggaccatgtcttgataggattgtgacgtgtgacgaaaagtgggttttatatgacaaccagtgatgaccagctctgtggctggaccgggaagaagctccaaagcacttcccaaatccaaacttgcaccaaaaagaaggtcatggtcactggtagtctgctgatggtctgatccgctacagctttctgaatcctggtgaaaccattatatctgaggactatgctcagcaaatctatgagatgcaccaaaaactgccacacctgcaactggcattggtcaatagaaagggcccaattcttctccatgacaacgcccaaccacacgtcgcacaaccaatgcttcaaaagttcaatgcattgggctaccaagttttggctcatccttcatattcacctgacctctcatcaacagactaccacttcttcaagcatctccacaactttttgcag

SEQ ID NO: 1774 - DNA, 254 bp, Homo sapiens
  full length sequence of bloodCirc_08827
gctgcagagactgcaagtctggaagaacagctgcaaggatggggagaagtgatgctgatggctgataaagtcctccgatgggaaagagcctggtttccacctgccatcatgggtgtggtttctttggtgtttctgattatctactatctagatccatctgttctgtccggcgtttcctgttttgttatgtttttgtgcttggctgactaccttgttcccattctagcgcctagaatttttggctccaataaatg

SEQ ID NO: 1775 - DNA, 1298 bp, Homo sapiens
  full length sequence of bloodCirc_09125
atcttgagccagatgattgtgcatccatttacatctttaatgtagatccacctccatctactttaaccacaccactttgcttaccacatcatggattaccgtctcactcttctgttttgtcaccatcgtttcagctccaaagtcacaaaaactatgaaggaacttgtgagattcctgaatctaaatatagcccattaggtggtcccaaaccctttgagtgcccaagtattcaaattacatctatctctcctaactgtcatcaagaattagatgcacatgaagatgacctacagataaatgacccagaacgggaatttttggaaaggccttctagagatcatctctatcttcctcttgagccatcctaccgggagtcttctcttagtcctagtcctgccagcagcatctcttctaggagttggttctctgatgcatcttcttgtgaatcgctttcacatatttatgatgatgtggactcagagttgaatgaagctgcagcccgatttacccttggatcccctctgacttctcctggtggctctccagggggctgccctggagaagaaacttggcatcaacagtatggacttggacactcattatcacccaggcaatctccttgccactctcctagatccagtgtcactgatgagaattggctgagccccaggccagcctcaggaccctcatcaaggcccacatccccctgtgggaaacggaggcactccagtgctgaagtttgttatgctgggtccctttcaccccatcactcacctgttccttcacctggtcactcccccaggggaagtgtgacagaagatacgtggctcaatgcttctgtccatggtgggtcaggccttggccctgcagtttttccatttcagtactgtgtagagactgacatccctctcaaaacaaggaaaacttctgaagatcaagctgccatactaccaggaaaattagagctgtgttcagatgaccaagggagtttatcaccagcccgggagacttcaatagatgatggccttggatctcagtatcctttaaagaaagattcatgtggtgatcagtttctttcagttccttcaccctttacctggagcaaaccaaagcctggccacacccctatatttcgcacatcttcattacctccactagactggcctttaccagctcattttggacaatgtgaactgaaaatagaagtgcaacctaaaactcatcatcgagcccattatgaaactgaaggtagccgaggggcagtaaaagcatctactgggggacatcctgttgtgaag

SEQ ID NO: 1776 - DNA, 381 bp, Homo sapiens
  full length sequence of bloodCirc_08521
gtgtgcaactgaggaacatggctcaagaaactaatcacagccaagtgcctatgctttgttccactggctgtggattttatggaaaccctcgtacaaatggcatgtgttcagtatgctataaagaacatcttcaaagacagaatagtagtaatggtagaataagcccacctgcaacctctgtcagtagtctgtctgaatctttaccagttcaatgcacagatggcagtgtgccagaagcccagtcagcattagactctacatcttcatctatgcagcccagccctgtatcaaatcagtcacttttatcagaatctgtagcatcttctcaattggacagtacatctgtggacaaagcagtacctgaaacagaagatgtgcagg

SEQ ID NO: 1777 - DNA, 329 bp, Homo sapiens
  full length sequence of bloodCirc_22418
attttctattttgtacatacattattttgtatatactgtatatgatgacttcagtgagcagtgaccattgtcgaggtgctcgggaaaaaccacagatttcagcagcacaatcaacgcaaccacagaaacaagtggtacaggcaacagctgaacagatgcgtctcgctcaagtgatctttgataagaatgattcagattttgaagctaaagttaagcagcttatggaagtgacagggaaaaatcaggatgaatgcatagtggccctacatgattgtaatggagatgtgaacaaagctatcaatatattgctggaagggaattcagacaca

SEQ ID NO: 1778 - DNA, 449 bp, Homo sapiens
  full length sequence of bloodCirc_17441
gaggacttaaatgcattggacagtggacaaagaccatttaaatggattacaaaaagcagacttcaccaggcagagcggcctctaacttcttcagtaatgttgccatttaccatgtgtctgttggggatcaggtccgtcgctaggcacccttcgtgcttttaggtaatagtcatagctaccctgaataagggtgaggagatggcattcccatttagaaaagttgaaaccaggattgcaagaagtgtatgagccgggatgggaagccaggtctgtctctctgcccttagatcacgctgctgttactattctttgtgacaccctaggacattgccgtggaaggaaggggagaaaccttgatagggcccttggatgaagcactgcagcttatgctaagaagatcaaggccctgttagactggaaacattcattgtaagacctagtgccataag

SEQ ID NO: 1779 - DNA, 340 bp, Homo sapiens
  full length sequence of bloodCirc_04651
actttatattcagagcaccaatcaaattaagcaagcctggggaacttcgtgaggaatatgaaagcttgagaaagctgagagaagaaaagttacaagaggaaaaaccctctgaagatcaaatccacaagctgttaccagaggatacagaaacagggaaaaggaaaatggatgaacagaaaaaaagagatgaaccattagtactgaaaacaaatctggaacgttgtcctgcacgtctctcagattcagagaatgaagaaccttctcgaggccagatgacacagacacatcgctcggcatttgtttccaagaacaactcctactccttagctttcctggcagg

SEQ ID NO: 1780 - DNA, 172 bp, Homo sapiens
  full length sequence of bloodCirc_10064
gttaaatcttcgtgaacttggacccctggcatctcatatgcgttggtttatctggctcatggcagctggaggaaccatttatgtatttctctaccatgaaaaatataaggtggttgaactctttttctatctcacaatgggattctctccagccttggtggtgacatcaatg

SEQ ID NO: 1781 - DNA, 304 bp, Homo sapiens
  full length sequence of bloodCirc_11243
ttcaactttagttggcttaccaagagtgaagcgtgacaagtactcagtcttcaactttctgacgctcccagagacagcttccttgcccaccactcaagcatcaagtgaaaaagtatcacagcaccgaggtcccgacaaatcaagaaaaccatccagatgggatacctctaaacacgaaaagaaagaagattccattagtgaatttttaagtttggctagatcaaaagccgagccacctaaacaacagtccagccccttagtaaacaaagaggaagagcatgcaccagaattatccgcaaatcag

SEQ ID NO: 1782 - DNA, 201 bp, Homo sapiens
  full length sequence of bloodCirc_13939
gccactattgaactctgcagtacccatgcaaatgatgcctctgccctgaggattctgttttcttccctgatcctgatctcaaaattgttctatagtttaaactttcaggatctccctgaattttttgaagataatatggaaacttggatgaataattttcatactctcttaacattggataataagcttttacaaactgat

SEQ ID NO: 1783 - DNA, 495 bp, Homo sapiens
  full length sequence of bloodCirc_20310
ggtgttctaaggatacattttattgaagctcaggatcttcaggggaaagacacttaccttaagggacttgtcaagggaaagtcagacccctatggaatcattagagttggcaaccaaatcttccaaagcagagtcatcaaggagaacctcagtccaaagtggaatgaagtctatgaggctttagtgtatgaacatcctggacaagaattagagattgagctctttgatgaagacccagacaaggatgactttttaggaagtcttatgattgacctcattgaagttgaaaaggagcgccttttagatgaatggttcactctggacgaggttcccaaggggaagctacacttgagactggagtggctcacgttaatgccaaatgcgtcaaacctcgacaaggtgctaacagacatcaaagctgacaaagaccaagccaacgatggtctttcctctgcattgctgatcttgtacttggattcagcaaggaaccttccg

SEQ ID NO: 1784 - DNA, 302 bp, Homo sapiens
  full length sequence of bloodCirc_12027
gatttggtgctatggagaaatttttggtagaatataagagtgcagtggagaagaaactggcagagtacaaatgtaacaccaacacagcaattgaactaaaattagttcgttttcctgaagatcttgaaaatgacattagaactttctttcctgagtatacccatcaactctttggggatgatgaaactgcttttggttacaagggtctaaagatcctgttatactatattgctggtagcctgtcaacaatgttccgtgttgaatatgcatctaaagttgatgagaactttgactgtgtagag

SEQ ID NO: 1785 - DNA, 304 bp, Homo sapiens
  full length sequence of bloodCirc_05780
tgctgttaacaaagatagacacttttcttgcgaagactgtaatggaaatgtcagtggaggttttgatgcttcaacatctcagatagttttgtgccagaataatatccataatcaggcccatatgaacagagtggtcacacacgagcttattcatgcatttgatcattgtcgtgcccatgtcgactggttcaccaacatcagacatttggcgtgctcagaggttcgagctgctaaccttagtggagactgctcacttgtcaatgaaatattcaggttacattttggattaaaacaacaccaccag

SEQ ID NO: 1786 - DNA, 216 bp, Homo sapiens
  full length sequence of bloodCirc_23021
agtgcttcgctcctggtgctctacaaggactatagaggcaacgtcaaaagaaataaaactctacattgtttgcagatacagctactttggggaaaccttgtttcccaggagtaaagaaacagttacaagcctcccacacatttgtgcctataaagctgctgcaacaaacagaccatggctcagtggagtgttttacacaatctgattatatacatg

SEQ ID NO: 1787 - DNA, 493 bp, Homo sapiens
  full length sequence of bloodCirc_14612
ttacacaacagggcatatttgggcatgtccaccaagtgagggagatgattatatcttccattgccatcctcctgaccagaagatacccaagcccaagcgactgcaggaatggtacaaaaaaatgcttgacaaggctgtatcagagcgtattgtccatgactacaaggatatttttaaacaagctactgaagatagattaacaagtgcaaaggaattgccttatttcgagggtgatttctggcccaatgttctggaagaaagcattaaggaactggaacaggaggaagaagagagaaaacgagaggaaaacaccagcaatgaaagcacagatgtgaccaagggagacagcaaaaatgctaaaaagaagaataataagaaaaccagcaaaaataagagcagcctgagtaggggcaacaagaagaaacccgggatgcccaatgtatctaacgacctctcacagaaactatatgccaccatggagaagcataaagag

SEQ ID NO: 1788 - DNA, 267 bp, Homo sapiens
  full length sequence of bloodCirc_12275
gacagtatttatgatgaaatggaagagaagtggtcaaaacagaaggcgaaatggaagaaggatgagaagttcgagcgagaaaatatcctgctacagcaaaaaaaaaagatgaccaaaaaattcgaaatggagtcaggagaagaagataagaaaataaatgaatcctgcagtgctgtctttgagaacttcattcaagagaaggaggagctcttgaaacaacatcaaagtgacaccttgcaattagaagagctgagaaaaaccaaagag

SEQ ID NO: 1789 - DNA, 649 bp, Homo sapiens
  full length sequence of bloodCirc_00568
ataacaataatgaaaagctgagccccaaaccagggacaggtgaaccagttttaagtttgcactacagcacagaaggaacaactacaagcacaataaaactgaactttacagatgaatggagcagtatagcatcaagttctagaggaattgggagccattgcaaatctgagggtcaggaggaatctttcgtcccacagagctcagtgcaaccaccagaaggagacagtgaaacaaaagctcctgaagaatcatcagaggatgtgacaaaatatcaggaaggagtatctgcagaaaacccagttgagaaccatatcaatataacacaatcagataagttcacagccaagccattggattccaactcaggagaaagaaatgacctcaatcttgatcgctcttgtggggttccagaagaatctgcttcatctgaaaaagccaaggaaccagaaacttcagatcagactagcactgagagtgctaccaatgaaaataacaccaatcctgagcctcagttccaaacagaagccactgggccttcagctcatgaagaaacatccaccagggactctgctcttcaggacacagatgacagtgatgatgacccagtcctgatcccaggtgcaaggtatcgagcaggacctggtgatag

SEQ ID NO: 1790 - DNA, 311 bp, Homo sapiens
  full length sequence of bloodCirc_08122
gtaaaaaacatgaagcagatgagttgagtggagatgcttctgtggaagatgatgcttttatcaaggactgtgaattggagaatcaagaggcacatgagcaagatggaaatgatgaactaaaggactctgaagaatttggtgaaaatgaagaagaaaatgtgcattccaaggagttactctctgcagaagaaaacaagagagctcatgaattaatagaggcagaaggaatagaagatatagaaaaagaggacatcgaaagtcaggaaattgaagctcaagaaggtgaagatgatacctttctaacagcccaa

SEQ ID NO: 1791 - DNA, 331 bp, Homo sapiens
  full length sequence of bloodCirc_01196
ataattgtatggaagagatacagtgattttaagaaactacacaaagaactatggcaaattcacaaaaacttattccgacattcagagttgtttcctccatttgctaaaggaatagtgtttgggcgatttgatgaaactgttatcgaagagagaagacaatgtgctgaagacctgctacagttctctgccaatattcctgctctttacaatagtaaacagcttgaagactttttcaagggtggaataattaatgatagttctgaattaattggtcctgctgaagctcactcagattccctcattgatacctttcctgagtgtagtacggaag

SEQ ID NO: 1792 - DNA, 187 bp, Homo sapiens
  full length sequence of bloodCirc_08360
gctgaagacttgaagatgctaatcagacacatggagcactgggcacataggctattccctaaactgcagtttgaggattttattgacagagttgaatacctgggaagtaaaaaggaagttcagacctgtttaaaacgaattcgacttgatctccctattttacatgaagattttgttagcaataatg

SEQ ID NO: 1793 - DNA, 3455 bp, Homo sapiens
  full length sequence of bloodCirc_16383
aattcaactagagggcagccttgtggatggccccgaagcaagcctgatggaacaggatagaaccaaccatgttgagggcaacagactaagtccattcctgataccatcacctcccatttgccagacagaacctctggctacaaagctccagaatggaagcccactgcctgagagagctcatccagaagtaaatggagacaccaagtggcactctttcaaaagttattatggaataccctgtatgaagggaagccagaatagtcgtgtgagtcctgactttacacaagaaagtagagggtattccaagtgtttgcaaaatggaggaataaaacgcacagttagtgaaccttctctctctgggctccttcagatcaagaaattgaaacaagaccaaaaggctaatggagaaagacgtaacttcggggtaagccaagaaagaaatccaggtgaaagcagtcaaccaaatgtctccgatttgagtgataagaaagaatctgtgagttctgtagcccaagaaaatgcagttaaagatttcaccagtttttcaacacataactgcagtgggcctgaaaatccagagcttcagattctgaatgagcaggaggggaaaagtgctaattaccatgacaagaacattgtattacttaaaaacaaggcagtgctaatgcctaatggtgctacagtttctgcctcttccgtggaacacacacatggtgaactcctggaaaaaacactgtctcaatattatccagattgtgtttccattgcggtgcagaaaaccacatctcacataaatgccattaacagtcaggctactaatgagttgtcctgtgagatcactcacccatcgcatacctcagggcagatcaattccgcacagacctctaactctgagctgcctccaaagccagctgcagtggtgagtgaggcctgtgatgctgatgatgctgataatgccagtaaactagctgcaatgctaaatacctgttcctttcagaaaccagaacaactacaacaacaaaaatcagtttttgagatatgcccatctcctgcagaaaataacatccagggaaccacaaagctagcgtctggtgaagaattctgttcaggttccagcagcaatttgcaagctcctggtggcagctctgaacggtatttaaaacaaaatgaaatgaatggtgcttacttcaagcaaagctcagtgttcactaaggattccttttctgccactaccacaccaccaccaccatcacaattgcttctttctccccctcctcctcttccacaggttcctcagcttccttcagaaggaaaaagcactctgaatggtggagttttagaagaacaccaccactaccccaaccaaagtaacacaacacttttaagggaagtgaaaatagagggtaaacctgaggcaccaccttcccagagtcctaatccatctacacatgtatgcagcccttctccgatgctttctgaaaggcctcagaataattgtgtgaacaggaatgacatacagactgcagggacaatgactgttccattgtgttctgagaaaacaagaccaatgtcagaacacctcaagcataacccaccaatttttggtagcagtggagagctacaggacaactgccagcagttgatgagaaacaaagagcaagagattctgaagggtcgagacaaggagcaaacacgagatcttgtgcccccaacacagcactatctgaaaccaggatggattgaattgaaggcccctcgttttcaccaagcggaatcccatctaaaacgtaatgaggcatcactgccatcaattcttcagtatcaacccaatctctccaatcaaatgacctccaaacaatacactggaaattccaacatgcctggggggctcccaaggcaagcttacacccagaaaacaacacagctggagcacaagtcacaaatgtaccaagttgaaatgaatcaagggcagtcccaaggtacagtggaccaacatctccagttccaaaaaccctcacaccaggtgcacttctccaaaacagaccatttaccaaaagctcatgtgcagtcactgtgtggcactagatttcattttcaacaaagagcagattcccaaactgaaaaacttatgtccccagtgttgaaacagcacttgaatcaacaggcttcagagactgagccattttcaaactcacaccttttgcaacataagcctcataaacaggcagcacaaacacaaccatcccagagttcacatctccctcaaaaccagcaacagcagcaaaaattacaaataaagaataaagaggaaatactccagacttttcctcacccccaaagcaacaatgatcagcaaagagaaggatcattctttggccagactaaagtggaagaatgttttcatggtgaaaatcagtattcaaaatcaagcgagttcgagactcataatgtccaaatgggactggaggaagtacagaatataaatcgtagaaattccccttatagtcagaccatgaaatcaagtgcatgcaaaatacaggtttcttgttcaaacaatacacacctagtttcagagaataaagaacagactacacatcctgaactttttgcaggaaacaagacccaaaacttgcatcacatgcaatattttccaaataatgtgatcccaaagcaagatcttcttcacaggtgctttcaagaacaggagcagaagtcacaacaagcttcagttctacagggatataaaaatagaaaccaagatatgtctggtcaacaagctgcgcaacttgctcagcaaaggtacttgatacataaccatgcaaatgtttttcctgtgcctgaccagggaggaagtcacactcagacccctccccagaaggacactcaaaagcatgctgctctaaggtggcatctcttacagaagcaagaacagcagcaaacacagcaaccccaaactgagtcttgccatagtcagatgcacaggccaattaaggtggaacctggatgcaagccacatgcctgtatgcacacagcaccaccagaaaacaaaacatggaaaaaggtaactaagcaagagaatccacctgcaagctgtgataatgtgcagcaaaagagcatcattgagaccatggagcagcatctgaagcagtttcacgccaagtcgttatttgaccataaggctcttactctcaaatcacagaagcaagtaaaagttgaaatgtcagggccagtcacagttttgactagacaaaccactgctgcagaacttgatagccacaccccagctttagagcagcaaacaacttcttcagaaaagacaccaaccaaaagaacagctgcttctgttctcaataattttatagagtcaccttccaaattactagatactcctataaaaaatttattggatacacctgtcaagactcaatatgatttcccatcttgcagatgtgtag

SEQ ID NO: 1794 - DNA, 256 bp, Homo sapiens
  full length sequence of bloodCirc_11998
gcaacaagaatgggtgaatcagcaaagggaagatattgaaaggcaaaggaaacttctagccaaacgcaaacctcccacagctaataattctcaggcaccctctaccaattctgaaccaaaacaaaggaaaaacaaagcagtcaatggagcagagaatgatccctttgttagaccaaatttaccacaactgttgactttggcagaatatcatgaacaggaagaaattttcaaacttagactaggacatctcaaaaag

SEQ ID NO: 1795 - DNA, 128 bp, Homo sapiens
  full length sequence of bloodCirc_06802
gtgaagtatttgactatttggttgcacatggcaggatgaaggaaaaagaagcaagatctaaatttagacagattgtgtctgcagttcaatactgccatcagaaacggatcgtacatcgagacctcaag

SEQ ID NO: 1796 - DNA, 856 bp, Homo sapiens
  full length sequence of bloodCirc_08341
gcctaatttgtagatatcctcaagaagattatgagtcattctcactaccggaatctgttcctctattttgtttaccaatgggtgcaaccattgaatgttggccatcaaatagcaaataccctctgcctgtattttctacttttgttttaactggagcctcagctgaaaaggtttatggtgctgctattcagttttatgaaccatactctgaggagaatctcacagaaaagcagagacttcttttgggtttaacatcagcagatgggaagtctgatagttccaaaacaattcatactaacaaatgcatctgtcttctttctcactggcctttttttgatgcattcaggaagtttctgacttttctgtatcgttattccatctctgggcctcatgtccttccaattgagaagcatatttctcattttatgcataaagttccttttccatctcctcagagaccacggattttagttcagttatcaccacatgataatctgattctcagtcagcctgtgtcttcacctcttccactaagtggtggcaagttttcaacactactgcagaatttaggccctgaaaatgctgtgacactactggtgtttgcagtaacagaacataaaattcttatccattccctacggccatccgtgcttactagtgtgacagaagcattagtgtctatgattttccctttccactggccatgcccgtatgttcctctctgcccactggctttagcagatgtcttgagtgcaccatgtccattcatagtagggattgattcaagatactttgatctctatgatcctccaccagatgtcagttgtgttgatgtagataccaacactatttctca

SEQ ID NO: 1797 - DNA, 2063 bp, Homo sapiens
  full length sequence of bloodCirc_15592
gttcttctgtgtggcagttcagaatgatggatcaagctagatcagcattctctaacttgtttggtggagaaccattgtcatatacccggttcagcctggctcggcaagtagatggcgataacagtcatgtggagatgaaacttgctgtagatgaagaagaaaatgctgacaataacacaaaggccaatgtcacaaaaccaaaaaggtgtagtggaagtatctgctatgggactattgctgtgatcgtctttttcttgattggatttatgattggctacttgggctattgtaaaggggtagaaccaaaaactgagtgtgagagactggcaggaaccgagtctccagtgagggaggagccaggagaggacttccctgcagcacgtcgcttatattgggatgacctgaagagaaagttgtcggagaaactggacagcacagacttcaccggcaccatcaagctgctgaatgaaaattcatatgtccctcgtgaggctggatctcaaaaagatgaaaatcttgcgttgtatgttgaaaatcaatttcgtgaatttaaactcagcaaagtctggcgtgatcaacattttgttaagattcaggtcaaagacagcgctcaaaactcggtgatcatagttgataagaacggtagacttgtttacctggtggagaatcctgggggttatgtggcgtatagtaaggctgcaacagttactggtaaactggtccatgctaattttggtactaaaaaagattttgaggatttatacactcctgtgaatggatctatagtgattgtcagagcagggaaaatcacctttgcagaaaaggttgcaaatgctgaaagcttaaatgcaattggtgtgttgatatacatggaccagactaaatttcccattgttaacgcagaactttcattctttggacatgctcatctggggacaggtgacccttacacacctggattcccttccttcaatcacactcagtttccaccatctcggtcatcaggattgcctaatatacctgtccagacaatctccagagctgctgcagaaaagctgtttgggaatatggaaggagactgtccctctgactggaaaacagactctacatgtaggatggtaacctcagaaagcaagaatgtgaagctcactgtgagcaatgtgctgaaagagataaaaattcttaacatctttggagttattaaaggctttgtagaaccagatcactatgttgtagttggggcccagagagatgcatggggccctggagctgcaaaatccggtgtaggcacagctctcctattgaaacttgcccagatgttctcagatatggtcttaaaagatgggtttcagcccagcagaagcattatctttgccagttggagtgctggagactttggatcggttggtgccactgaatggctagagggatacctttcgtccctgcatttaaaggctttcacttatattaatctggataaagcggttcttggtaccagcaacttcaaggtttctgccagcccactgttgtatacgcttattgagaaaacaatgcaaaatgtgaagcatccggttactgggcaatttctatatcaggacagcaactgggccagcaaagttgagaaactcactttagacaatgctgctttccctttccttgcatattctggaatcccagcagtttctttctgtttttgcgaggacacagattatccttatttgggtaccaccatggacacctataaggaactgattgagaggattcctgagttgaacaaagtggcacgagcagctgcagaggtcgctggtcagttcgtgattaaactaacccatgatgttgaattgaacctggactatgagaggtacaacagccaactgctttcatttgtgagggatctgaaccaatacagagcagacataaaggaaatgggcctgagtttacagtggctgtattctgctcgtggagacttcttccgtgctacttccagactaacaacagatttcgggaatgctgagaaaacagacagatttgtcatgaagaaactcaatgatcgtgtcatgaga

SEQ ID NO: 1798 - DNA, 4470 bp, Homo sapiens
  full length sequence of bloodCirc_02669
cacccaggggcataacttgttctacaaactattccagtcaaattgtgcctccttcaggaatagtttcttgggtaagtgtttgatatttgctctcaccccaggagggctcctcccagctgtcttatttcctgtttctctactaggggcacagcagcctgcagcctaggatatgtcttccttaaatccatgaaggaagacatgtgcttttcaccacaacctccattgttcttggtagtgcctttaggtttgagcttcttcacagactattgtaaatgaaattaattcctttgggaagagattgggagaatctgttttctgacttgcctctccctcttcttttccccttagcaaaataatcagaaccaggtctctggagctaggggtgaagactactgcaggcttctctctgggtgataccacaactctaggagctgagtgctagattggggatagagtagccagaggtcctcttggcttgcctttcccactatggaaccacttcctcatgagccagggcaagacagtcagggttccagtattctcagtgttctgtgcccaaggtagaccctccattccatgagtgggggctgggtcaatgaaggaatccccctcctcttgactgaacttgcctggaagtaacaggtgactggaggctagatgagaaatgttcctatcctcctcttcccagggagaaagcccaccaaatgagagctgtgggatgagggagccctgtgttcctggcaatagaagtctagcatggagtggccgggcgtggtggctcacgcctgtaatcccagcactttgggaggccgaggtgggcagatcacgaggtcaggagatagagaccatcctggctaacacggtgaaaccccatctctactaaaaatacaaaaaaatagccgggtgtggtggtgggcgcctgtagtcccagctactcgggaggctgaggcaggagaatggcgtgaacccaggcggtagagcttgcagtgagccgagattgtgccactgcactccagcctgggcgacaaattgagactccgtctcaaaaaaataaaaaataaaaagtaaagaagtctactgtggaatctgccaccctgagcttgttggggaaacagggttcaaacaccacagacttggctttcttatcaaattgtcatcgattttcttaagtagatttttaaaatttgctgtttgctcttaagatcatttccagaggctgtaaatgttttggtttaaaataattttcacgaatttcactggggagcagatcagcagggctcttcatactgtcatccttaaagtcgatcttcctagtttgggtttttaagttttctacaggaggaagtacaggtagtttgttaagactattttgcggggaagcctgagtgagaaaactgacatttttgagttaataggttaattaggaaataaagactaatggattttgaagaaagatgatatgatggaataggaagataaaagaaagtgatagaggtagcccgcttcattgtttggattctttatgggtttgggatacttaaagacttggacttaaaaattctgaaaaccaaaggttcttagagaatgttaatgtgtggattctatttattggcttgccgaacatgttcatgctttatcccaccgtttagtatattcatttaaaatggaatacgttgttctgattttagattatttttgtgcataaacactcttagcaaaaccccctgagcattagtaaatccaaattagactttaatccatataacattcaactcatactcctgtgagaaattttattgaattttgactttatatttgacaaggaaagctggttcttagagcagttgtgatttagctaacttggattattaaattcaaagtttctagtgtatatggttattataatttttttacaaactaacagttatatgtttttcaggagtcataaggactgtgtgttaaaagcacccagctacaacattatattgatataaatttagttactagtttttttccctctaaaaatttggtgccagtctgtctgaatcaaatgacttcaaatgcaaattagcgttttagttgggagaaactcggggggctttctgctttccatactagtttagaaacaggagaaaaccactgagcatcgcctgtgtccctacttaacatttccttaaaatttttttctttaatcttacttactgggaaaacataaaacagcatttaaccccctctattagtgtctttcagtataaactatagtaggccattgatattttctaagtgtttatttcagttttagtgttaactctttgtaaatcagcgcaacacatactcaaatcctgatagtgtgtgaaacatcccgtcaggtatggatgatggatgcagagaattgtgagactaagtcatatttgacattttaaggcataaatgcacgcaatttagaggactgcaagatagagaagagtgaaagcagcatgtatggccgagtgcgaaagaggggaggatttggacaggctttgaggaatctgggaaaacttccagttggtatgaaaggcctgaaggcaggaatattcatagtgtcttctgggcatatgaggtgactttctagattggaatgtttatattaagagaatatatgattagaaagattaattgtgggctgggtgtggtggctcaggcctgtaatcccagcactttgggaggccatgtgggaggccgaggcaggcagatcacttgaggtcaggagttcaagactgatctggccagcgtggcaaaaccccatctctgctaaaaatacaaaaatcatccaggtatagtggtgcatgcctgtaatcccagccacttgggaggctgaggcaagagaatagcttgaatcaaggaggcagaggttgcagtgagccaagatcgtgccactgcactccagcttgggcaacagagcaagactgtgtctcaagaaaaaataaaaaaggaacattaattgtggtggaccttaaatgtgaaaccaagaacttttgactatgtgtgtgtgtgtgtgtgtgtgtgtgtgtgtgtgtatctgtttgtgtggtcagtaagaagccactaaaactttctgagcaagtagatatcatggctagtgacaatgtgtagggtgaattgaaaaccacggggctttaagcccaattttctttcattttctttttctttagctttaatggaggagtatgagttgtgttttaaattaaaagttttttaaaacctacagtttataactcagcacaaacttctccataaaaacaacaatattagtgatgagcatatgaatgcctggataattcataggtaactgaggtgttatatagttggactttggaattagactagcttgaattctggttttgccattcactttgtaaaattgaacaaacttgttaaccttcctaagcttcattcttttcatctggagagaggagccaataatattgccctcttcagggttgtgagcattaaataagataatgcatgtaaaaagcacttagcatactgcctggcaaatagtaaacatctctaatgaatatctctgctgtgttaattgttattgatgttgctattacagtcatctttatcatgtactaatcactgtctgtaatagtcagctctctgtattcgtgggctccacatccatgggttccacatccatggattcaaacaactgtggattgaaaatattttttaaaaatttaatctgcgctgaacatgtacagacttttttccttgtcattattctctgaacaatatagtcttaacaactatttacatagcatttacattgtattaggtattataagtaatctggagatgattcaaaacatatgggagaatgtgtataatgcagatactgggccattttatattagagacttgagcatcctgggattttggtatccttgggaagtactggaaccaatcccccatggatgccaaggggactgtatattatttccatggaacatgcattctgaattttgatcttgtaccgtaggaacactcttcccatctggttcacagtctctctcctgccccacctaaacttcatggcctacttgctgcctctaggcttttcttttctttgttctctcttgccttatcaatgggggcataccaaaaaaccaagacttatgggtgccatagcgaaggcaccatttgctgccagttatgggggagtgtggtaagctttggttttgtagagcacgtgtagtattaggtgttcattttgctttgtgtttttgtacaggtgagttttgttatgctttaaactgtggtgtttattattcagacatttagacttatctttacttttgtcaggtttaagccgttttttccataccagaccttgcaaggatttgaagaagatgaagagcatatccatatacaacaatgggcacttactgaaggccgtcttaaagttacgttgttagaatgtagcag

SEQ ID NO: 1799 - DNA, 248 bp, Homo sapiens
  full length sequence of bloodCirc_22521
attttgaagccagcttcataaggctattggacaaaataacgaatggttctcgaattgaaataaaccaaacaggaacaaccttatattatcagcctggcctcctgtatggtggatctgtggaacatgactgtagcgtccttcgtggcattgggtattacctggagagtcttctttgcttggctccatttatgaagcacccgttaaaaatagttctacgaggagtgaccaatgatcaggttgacccttca

SEQ ID NO: 1800 - DNA, 254 bp, Homo sapiens
  full length sequence of bloodCirc_14172
gaatctttctgacattgatcaagatggaaaacttacagcagaggaatttatcctggcaatgcacctcattgatgtagctatgtctggccaaccactgccacctgtcctgcctccagaatacattccaccttcttttagaagagttcgatctggcagtggtatatctgtcataagctcaacatctgtagatcagaggctaccagaggaaccagttttagaagatgaacaacaacaattagaaaagaaattacctg

SEQ ID NO: 1801 - DNA, 347 bp, Homo sapiens
  full length sequence of bloodCirc_22227
actgggccagtgccattcgcgtcgcagctctggactgcatggaagagaagaaccaggccgtgtgccatgactacgacatccacttctaccccaccttccggtattttaaagcatttacaaaggagtttacaactggagaaaattttaaaggacctgaccgagagctgcgaacagtcagacagacgatgattgacttcctgcagaaccacacggaaggaagccggccccctgcctgcccgcgcctagaccccattcagcccagtgatgttctttcccttcttgacaaccgtggcagccattacgtggctattgtctttgaaagcaacagctcctaccttggacgggag

SEQ ID NO: 1802 - DNA, 231 bp, Homo sapiens
  full length sequence of bloodCirc_21772
gaaatctatgctcctaaactccaagagtttgcttacgtcactgatggtgcttgcagtgaagaggatatcttaaggatggaactcattatattaaaggctttaaaatgggaactttgtcctgtaacaatcatctcctggctaaatctctttctccaagttgatgctcttaaagatgctcctaaagttcttctacctcagtattctcaggaaacattcattcaaatagctcag

SEQ ID NO: 1803 - DNA, 128 bp, Homo sapiens
  full length sequence of bloodCirc_12762
actgatggtgcatctgcaatgttaatcatggcggaggaaaaggctctggccatgggttataagccgaaggcatatttgagggattttatgtatgtgtctcaggatccaaaagatcaactattacttgg

SEQ ID NO: 1804 - DNA, 381 bp, Homo sapiens
  full length sequence of bloodCirc_08619
tcactcagcctctgaagaagcttcgggttcagactcaggcagtcagtcggaaagtgagcagggaagtgatccaggaagtggacatggcagcgagtcgaacagcagctctgaatcttctgagagtcagtcggaatctgagagcgaatcagcaggttccaaatcccagccagtcctcccagaagccaaagagaagccagcctctaagaaggaacggatagctgatgtgaagaagatgtgggaagaatatcctgatgtttatggggtcaggcggtcaaaccgaagcagacaagaaccatcgcgatttaatattaaggaagaggcaagtagcgggtctgagagtgggagcccaaaaagaagaggccagaggcagctgaaaaaaca

SEQ ID NO: 1805 - DNA, 791 bp, Homo sapiens
  full length sequence of bloodCirc_01109
tgagaaagatcagtctaaagaaaaggagaagaaagtgaaaaaaacaattccttcctgggctaccctttctgccagccagctagccagggcccagaaacaaacaccgatggcttcttccccacgtcccaagatggatgcaatcttaactgaggccattaaggcatgcttccagaagagtggtgcatcagtggttgctattcgaaaatacatcatccataagtatccttctctggagctggagagaaggggttatctccttaaacaagcactgaaaagagaattaaatagaggagtcatcaaacaggttaaaggaaaaggtgcttctggaagttttgttgtggttcagaaatcaagaaaaacacctcagaaatccagaaacagaaagaataggagctctgcagtggatccagaaccacaagtaaaattggaggatgtcctcccactggcctttactcgcctttgtgaacctaaagaagcttcctacagtctcatcaggaaatatgtgtctcagtattatcctaagcttagagtggacatcaggcctcagctgttgaagaacgctctgcagagagcagtagagaggggccagttagaacagataactggcaaaggtgcttcggggacattccagctgaagaaatcaggggagaaacccctgcttggtggaagcctgatggaatatgcaatcttgtctgccattgctgccatgaatgagccgaagacctgctctaccactgctctgaagaagtatgtcctagagaatcacccaggaaccaattctaactatcaaa

SEQ ID NO: 1806 - DNA, 598 bp, Homo sapiens
  full length sequence of bloodCirc_18951
ccaaatttgtatcctactgtggggcttcaaacaccaggagaagtggtcgatgccaattttgggcaacatcctttcgtgtttgatatagaagactatatgcgggagtggagaaccaaaatccaggcacagatagatcgatttcctatcggagatcgagaaggagaatggcagaccatgatacaaaaaatggtttcatcttatttagtccaccatgggtactgtgccacagcagaggcctttgccagatctacagaccagaccgttctagaagaattagcttccattaagaatagacaaagaattcagaaattggtattagcaggaagaatgggagaagccattgaaacaacacaacagttatacccaagtttacttgaaagaaatcctaatctccttttcacattaaaagtgcgtcagtttatagaaatggtgaatggtacagatagtgaagtacgatgtttgggaggccgaagtccaaagtctcaagacagttatcctgttagtcctcgaccttttagtagtccaagtatgagccccagccatggaatgaatatccacaatttagcatcaggcaaaggaagcaccgcacatttttcag

SEQ ID NO: 1807 - DNA, 294 bp, Homo sapiens
  full length sequence of bloodCirc_01465
gggtagacttaaagtctgaaacagaaggtttcagtgcatcaagcagtccaaatgacttactcgaaaacctcactcaaggggaaataatttatcctgagatttgtatgctggaattaaatttgctttctgctagtaaagccaaacttgatgtgcttgcccatgtatttgagagttttttgaaaattattaggcagaaagaaaagaatgtttttctgctcatgcaacagggaactgtgaaaaatcttttaggagggttcttgagtattttaacacaggatgattctgattttcaag

SEQ ID NO: 1808 - DNA, 286 bp, Homo sapiens
  full length sequence of bloodCirc_03064
ataagtaaagatcaaactcttttacaagcagagcctccaaaacctgacaaaacagtcattttaaatattgcagaaatagtaaggcttgtacaaagatttgaagaactgaagaatcgccttaaacagaggtctaaatcctccgtgaaagtcatgttgtctaaaactatggataaagaaaatcgaccagaagcagtgaaaagttgtgaagctctggcacagaaaattgaagaattcttagaagcccactcaactgatgaatttaaagatgtttctgcaacagaaccac

SEQ ID NO: 1809 - DNA, 156 bp, Homo sapiens
  full length sequence of bloodCirc_19408
attctttggatgggaagagaccttgaaaggacctctagtttatcctgcaactccagtcaatatcccacttaaatcattccaggtaatagagaagaggaaacctaaccaatgactgtggaataatatggaagaagatggaaaaaacttgtttaatgg

SEQ ID NO: 1810 - DNA, 641 bp, Homo sapiens
  full length sequence of bloodCirc_21222
atcatccagtcactcgatggggattaccagcggaccacctgtttgtatcaccttcccacctctctgtagcaagaaaaatcacttcagcacctcttcagtaataatgatgaaactggtattaactgaatggcaattatggatttttaactctaattcacagtaaaccagcaagccatatgtttaaaatccaaccaaaaatcgttctgtgttgctgcatgtctcataccgttgtgagaagttgtgagatagccacttgtgcaaagaggaatgtaagtgttacctgcccgaggaacacagcagaagcagaaagagaagacgtcttaatttatcattacagatatatgaaagcattatttatatagatagaatatatagataaatacatatatttttggtggtaatgaaaatggctccgcagaatgccgacccggaatctatgcaagttcaagagttatccgtgcccctgccggacccgcagaaagccggaggcgcagaggccgagaactgcgagaccatcagcgaggggtccatagaccgaatccccatgcgcctgtgggtgatgcacggggcggtgatgtttggcagggagttctgttacgccatggaaaccgctctggtcacaccaatactgttgcagattg

SEQ ID NO: 1811 - DNA, 435 bp, Homo sapiens
  full length sequence of bloodCirc_21894
agttaaacatgaagtttctggagagacagtggtatttcaagggggagctcttggcaaaacaccagatggtcagggcctttctacttacaaggaactttgttctctggcaagtgatcttagccagccagatctggtgtataaatttatgaatttagccaaccatcatgcaatgtggaactctaggaagggtgctgcttttggttttaatgtaattgctaccagagctggagagcagctggctccttttctgcctcagctagttcctcgactttatcgttaccagtttgatcccaaccttggcattcgacaggccatgacaagtatttggaatgcgttggtcactgacaaatccatggtggataaatatttgaaagaaattcttcaagatttggttaagaaccttacaagcaatatgtggcgagttcgagaatccag

SEQ ID NO: 1812 - DNA, 585 bp, Homo sapiens
  full length sequence of bloodCirc_17147
aaaatatttacaccagcagctccagttcataccaataaagaagatcctgctacccaaactaatttgggatttatccatgcatttgtcgctgccatatcagttattattgtatctgaattgggtgataagacattttttatagcagccatcatggcaatgcgctataaccgcctgaccgtgctggctggtgcaatgcttgccttgggactaatgacatgcttgtcagttttgtttggctatgccaccacagtcatccccagggtctatacatactatgtttcaactgtattatttgccatttttggcattagaatgcttcgggaaggcttaaagatgagccctgatgagggtcaagaggaactggaagaagttcaagctgaattaaagaagaaagatgaagaatttcaacgaaccaaacttttaaatggaccgggagatgttgaaacgggtacaagcataacagtacctcagaaaaagtggttgcattttatttcacccatttttgttcaagctcttacattaacattcttagcagaatggggtgatcgctctcaactaactacaattgtattggcagctagagag

SEQ ID NO: 1813 - DNA, 416 bp, Homo sapiens
  full length sequence of bloodCirc_12555
gctgttcacggaagaccaggatgtagatgagggacttgtctatgacactgtattcaagcacttcaaaagacataagctggagatatcaaatgcaataaaaaagacatttccattccttgagggcctccgcgatcgggaactcatcacaaataaaatgtttgaagattctgaagattcttgtagaaacctggtccctgtacaaagagtggtgtacaatgttctcagtgaactggagaagacatttaacctgtcagttttggaagcactgttcagcgaggtcaacatgcaggaataccccgatttaattcacatttataaaagcttcaaaaatgcaatccaagacaaattgtctttccaagaaagtgatcgaaaagaaagggaagagaggcctgacatcaaactaagtcttaaacaag

SEQ ID NO: 1814 - DNA, 271 bp, Homo sapiens
  full length sequence of bloodCirc_03671
gttgaaatttataagagtttccgcccaggtgacattgtcttggccaaagtgatctccttaggtgatgcacagtccaactacctgctaaccaccgccgagaacgagctgggagtggtggtagcccacagtgagtcaggtatccagatggttcccatcagctggtgtgagatgcagtgccctaagacccacactaaagaattccggaaagtagcccgagtacaacccgaattcttgcagacctaagaagccactttttaccctatggaagggg

SEQ ID NO: 1815 - DNA, 449 bp, Homo sapiens
  full length sequence of bloodCirc_15853
gtatcattaatgggattggaaattttaagtgcctttgtggacagattatcaacacgctttaaatcctatgtagcaatggttattgtagctttaatagacagaatgggagatgccaaagacaaggttcgagatgaagctcagactctgatattgaagttaatggatcaagtagcaccacctatgtacatttgggagcagttggcttctggttttaaacacaagaattttcgatctcgagaaggcgtgtgtctgtgtcttattgaaaccttaaacatttttggggctcagccactagtcatcagcaaattgataccacatttgtgtatcctgtttggagactccaacagtcaggtgagagatgctgcaatattggctatagtggagatttatagacatgtgggagaaaaagtgaggatggatctttataagagaggaattccccctgctag

SEQ ID NO: 1816 - DNA, 378 bp, Homo sapiens
  full length sequence of bloodCirc_15700
acctgtcgcgaaatcgcctttcagaaattcctatagaagcatgtcactttgtttctctggaaaatctcaacttgtaccaaaattgtattcgttatattccagaggcaattttaaacctacaagctctaacattcttaaatattagtcggaaccaactgtcaacattgccggtacacttgtgtaatttgccattgaaagtcttaattgctagtaataacaaattggtgtcacttccagaagaaattggacaccttagacatttgatggaacttgatgtgagctgcaatgaaattcaaactataccttcccaaattggtaacctggaggccttgagagaccttaatgtaagaagaaatcacctagtacatttgcctgaag

SEQ ID NO: 1817 - DNA, 307 bp, Homo sapiens
  full length sequence of bloodCirc_03351
gtaaagaagcttcttaataaagtagtgctccgtgaatcttgcttttaccggaaattaacagacacctcaaaagatgaagagaaccatgaagagtctgagtcattgcaggaagatatgctaggaaacagattattacttccaacaccaacagtaaagcaggaatcaaaggatgtggaagaaaatgttggcctcattgtgtacaatggtgcaatggtagatgtaggaagcctcttgcaaaaattggaaaagagcgaaaaagtaagagctgaggtagaacagaagctgcagttactagaagaaaaaacag

SEQ ID NO: 1818 - DNA, 354 bp, Homo sapiens
  full length sequence of bloodCirc_11660
tgggagaactgaagtccaatcagttcagtatggcaaagaaaaggcaaataaagacagggtatttgcaagatccccaagtaagcccttggcacggaaattaatggattgggaagtagtaagcagaaattcaatatctgatgacaggttagaaacacaaagtcttccatcacgatctccaccgggaactcctaatcatcgaaattctacattcacgcaggaaggaacccggttacgaccatcttcagttggtcatttggtagaccatatggttcatacttccccaagcgaagtgtttgtaaatcagagatctccgtcatcaacacaagctaatagcattgttctggaatcatcacc

SEQ ID NO: 1819 - DNA, 320 bp, Homo sapiens
  full length sequence of bloodCirc_00498
tgtgttaacagggcacaaccattatgtgatgtgtgctcagttccaccccacagaagacttggtagtatcagccagcctggaccagactgtgcgcgtttgggatatttctggtctgaggaaaaaaaacctgtcccctggtgcggtggaatcggatgtgagaggaataactggggttgatctatttggaactacagatgcagtggtgaagcatgtactagagggtcacgatcgtggagtaaactgggctgccttccaccccactatgccccttattgtatctggggcagatgatcgtcaagtgaagatctggcgcatgaatg

SEQ ID NO: 1820 - DNA, 123 bp, Homo sapiens
  full length sequence of bloodCirc_11490
gaatgggaatggaaggcataggatttggaataaataaaatgggaggaatggaggggccctttggtggtggtatggaaaacatgggtcgatttggatctgggatgaacatgggcaggataaatg

SEQ ID NO: 1821 - DNA, 21 bp, Artificial Sequence
  hsaRTvinculinfwd
ctcgtccgggttggaaaagag

SEQ ID NO: 1822 - DNA, 22 bp, Artificial Sequence
  hsaRTvinculinrev
agtaagggtctgactgaagcat

SEQ ID NO: 1823 - DNA, 23 bp, Artificial Sequence
  hsaTFRCfwd
accattgtcatatacccggttca

SEQ ID NO: 1824 - DNA, 23 bp, Artificial Sequence
  hsaTFRCrev
caatagcccaagtagccaatcat

SEQ ID NO: 1825 - DNA, 26 bp, Artificial Sequence
  celegansEIF3D_fwd
cgccttgaacatggataactgctggg

SEQ ID NO: 1826 - DNA, 26 bp, Artificial Sequence
  celegansEIF3D_rev
gatcgtcatccgagttctcctcgtcg

SEQ ID NO: 1827 - DNA, 21 bp, Artificial Sequence
  hsaMBOAT2div_fwd
agtgcaagataaaggcccaaa

SEQ ID NO: 1828 - DNA, 24 bp, Artificial Sequence
  hsaMBOAT2div_rev
tgatcatcataggagtggagaaca

SEQ ID NO: 1829 - DNA, 22 bp, Artificial Sequence
  hsaMBOAT2con_fwd
tactccacaggtaatgttgtac

SEQ ID NO: 1830 - DNA, 26 bp, Artificial Sequence
  hsaMBOAT2con_rev
actttcattgaaggcagatcatacca

SEQ ID NO: 1831 - DNA, 23 bp, Artificial Sequence
  hsaDNAJC6div_fwd
ccagacatcttgaccactacaca

SEQ ID NO: 1832 - DNA, 22 bp, Artificial Sequence
  hsaDNAJC6div_rev
atgtgtctttgagggtgtcttt

SEQ ID NO: 1833 - DNA, 23 bp, Artificial Sequence
  hsaDNAJC6con_fwd
tctctactctactcctggcccag

SEQ ID NO: 1834 - DNA, 24 bp, Artificial Sequence
  hsaDNAJC6con_rev
gtaggtcacacatatagcccaggt

SEQ ID NO: 1835 - DNA, 22 bp, Artificial Sequence
  hsaTMEM56div_fwd
catcattgtgcgtccctgtatg

SEQ ID NO: 1836 - DNA, 24 bp, Artificial Sequence
  hsaTMEM56div_rev
gctgagactattgaaacctggaga

SEQ ID NO: 1837 - DNA, 21 bp, Artificial Sequence
  hsaTMEM56con_fwd
gctggcatacattgggaattt

SEQ ID NO: 1838 - DNA, 22 bp, Artificial Sequence
  hsaTMEM56con_rev
caatccgcacgatgaagaatac

SEQ ID NO: 1839 - DNA, 23 bp, Artificial Sequence
  hsaUBXN7div_fwd
accagtatttcctgcttttgagg

SEQ ID NO: 1840 - DNA, 23 bp, Artificial Sequence
  hsaUBXN7div_rev
ctacccttgcagatctattccgg

SEQ ID NO: 1841 - DNA, 23 bp, Artificial Sequence
  hsaUBXN7con_fwd
agaaatcccgtcacttggtccaa

SEQ ID NO: 1842 - DNA, 22 bp, Artificial Sequence
  hsaUBXN7con_rev
tgacagtgaggaaggtcagaga

SEQ ID NO: 1843 - DNA, 21 bp, Artificial Sequence
  hsaGSE1div_fwd
catcctccagctttgccgccg

SEQ ID NO: 1844 - DNA, 21 bp, Artificial Sequence
  hsaGSE1div_rev
ctggtcgcggtggaaagcatc

SEQ ID NO: 1845 - DNA, 20 bp, Artificial Sequence
  hsaGSE1con_fwd
agctcagttgtgcaggattc

SEQ ID NO: 1846 - DNA, 20 bp, Artificial Sequence
  hsaGSE1con_rev
cttctcaggtagtcctcggt

SEQ ID NO: 1847 - DNA, 24 bp, Artificial Sequence
  hsaMORC3div_fwd
catcctacgtggacagaaagtgaa

SEQ ID NO: 1848 - DNA, 23 bp, Artificial Sequence
  hsaMORC3div_rev
ctgttccgtggaaaacagagaat

SEQ ID NO: 1849 - DNA, 23 bp, Artificial Sequence
  hsaMORC3con_fwd
cagtgcagttgctgaattaatag

SEQ ID NO: 1850 - DNA, 20 bp, Artificial Sequence
  hsaMORC3con_rev
tcccattgtcggtgaatgtc

SEQ ID NO: 1851 - DNA, 24 bp, Artificial Sequence
  hsaPCNT1div_fwd
ccggtgtttagaagacttggagtt

SEQ ID NO: 1852 - DNA, 24 bp, Artificial Sequence
  hsaPCNT1div_rev
tgcagacagttctttgcgtagatt

SEQ ID NO: 1853 - DNA, 23 bp, Artificial Sequence
  hsaPCNT1con_fwd
ttgccattactgacctggagagc

SEQ ID NO: 1854 - DNA, 22 bp, Artificial Sequence
  hsaPCNT1con_rev
ccgtcaatgccgtctccttctc

SEQ ID NO: 1855 - DNA, 20 bp, Artificial Sequence
  hsaXPO1div_fwd
tgaaatcaagcagctgacga

SEQ ID NO: 1856 - DNA, 22 bp, Artificial Sequence
  hsaXPO1div_rev
agattcttccaaggaaccagtg

SEQ ID NO: 1857 - DNA, 19 bp, Artificial Sequence
  hsaXPO1con_fwd
gccagggacagacatttga

SEQ ID NO: 1858 - DNA, 23 bp, Artificial Sequence
  hsaXPO1con_rev
gctcaagtaaagctctttgtgac

1-22. (canceled)

23. A method for diagnosing a disease of a subject, comprising the step of:
determining the presence or absence of one or more circular RNA (circRNA) in a sample of a bodily fluid of said subject;
wherein the presence or absence of said one or more circRNA is indicative of the disease,
wherein the disease is a neurodegenerative disease and
wherein said bodily fluid is blood or cerebrospinal fluid.

24. The method according to claim 23, wherein the determination step comprises:
determining the level of said one or more circRNA; and
comparing the determined level to a control level of said one or more circRNA;
wherein differing levels between the determined and the control level are indicative of the disease.

25. The method according to claim 24, wherein said one or more circRNA is differentially expressed between the diseased and non-diseased state.

26. The method according to claim 23, wherein the circRNA is detected by detection of an exon-exon-junction in a head-to-tail arrangement.

27. The method according to claim 26, wherein circRNA is detected using a method selected from the group consisting of probe hybridization based methods, nucleic acid amplification based methods, and nucleic acid sequencing.

28. The method according to claim 23, wherein the sample is treated with RNase R before determination of the circRNA.

29. The method according to claim 23, wherein more than one circRNAs from a panel of circRNAs are determined.

30. The method according to claim 29, wherein said panel comprises a plurality of circRNAs that have been identified as being present at differing levels in bodily fluid samples of patients having the disease and patients not having the disease, preferably identified by principle component analysis or clustering.

31. The method according to claim 24, wherein said one or more circRNA comprises a sequence encoded by a sequence being at least 70% identical to a sequence selected from the group consisting of nucleotides 11 to 30 of any of the sequences of SEQ ID NO:1 to SEQ ID NO:910, preferably wherein the presence of increased or decreased levels as defined in Table 1 under “disease” for the circRNA comprising the respective sequence are indicative of the presence of a neurodegenerative disease.

32. The method according to claim 31, wherein said one or more circRNA has a sequence encoded by a sequence having at least 70% identity to a sequence selected from the group consisting of SEQ ID NO:911 to SEQ ID NO:1820, preferably wherein the presence of increased or decreased levels as defined in Table 1 under “disease” for the circRNA having the respective sequence are indicative of the presence of a neurodegenerative disease.

33. The method according to claim 24, wherein the levels of at least 100 circRNAs comprising a sequence encoded by a sequence being at least 70?/o identical to a sequence selected from the group consisting of SEQ ID NO:1 to SEQ ID NO:910 are determined in said sample of a bodily fluid of said subject and controlled to the respective control level.

34. The method according to claim 33, wherein said at least 100 circRNAs have a sequence encoded by a sequence selected from the group consisting of SEQ ID NO:911 to 1820, or a sequence being at least 70% identical thereto.

35. The method according to claim 33, wherein said at least 100 circRNAs comprise a sequence encoded by a sequence having at least 70% identity to a sequence selected from the group consisting of SEQ ID NO:1 to SEQ ID NO:200, or said circRNAs have a sequence having at least 70% identity to a sequence selected from the group consisting of SEQ ID NO: 911 to 1110.

36. The method according to claim 33, wherein the presence of increased or decreased levels as defined in Table 1 under “disease” for the respective circRNA for at least 10 circRNAs are indicative of the presence of a neurodegenerative disease.

37. The method according to claim 31, wherein the levels of all circRNAs comprising a sequence encoded by a sequence having at least 70% identity to a sequence selected from the group consisting of SEQ ID NO:1 to SEQ ID NO:910 or all circRNAs having a sequence encoded by a sequence having at least 70% identity to a sequence selected from the group consisting of SEQ ID NO:911 to SEQ ID NO:1820 are detected, wherein the presence of increased or decreased levels as defined in Table 1 under “disease” for at least 10 of the respective circRNAs are indicative of the presence of a neurodegenerative disease.

38. The method according to claim 23, wherein the neurodegenerative disease is Alzheimer's disease.

39. A nucleic acid probe specifically hybridizing to the sequence of nucleotide 11 to 30 of a sequence selected from the group consisting of the sequences listed in Table 1, or specifically hybridizing to a reverse complement sequence thereof.

40. A kit for diagnosing a neurodegenerative disease, comprising means for specifically detecting one or more nucleic acid sequence encoded by a sequence selected from the group consisting of SEQ ID NO:1 to 910 or SEQ ID NO:911 to SEQ ID NO:1820, or a sequence being at least 70% identical to the recited sequences.

41. The kit according to claim 40, wherein the kit comprises means for specifically detecting at least 100 nucleic acid sequences encoded by a sequence having at least 70% identity to a sequence selected from the group consisting of SEQ ID NO:1 to SEQ ID NO:910 or SEQ ID NO:911 to SEQ ID NO:1820.

42. The kit according to claim 40, wherein the kit comprises one or more nucleic acid probes specifically hybridizing to the sequence of nucleotide 11 to 30 of a sequence selected from the group consisting of SEQ ID NO:1 to SEQ ID NO:910, and the RNA sequences encoded by a sequence of SEQ ID NO:1 to SEQ ID NO:910, or hybridizing the reverse complements thereof.

43. The kit according to claim 40, further comprising means for handling and/or preparation of a bodily fluid sample, wherein the bodily fluid is blood or cerebrospinal fluid.

44. An array for determining the presence or level of a plurality of nucleic acids, comprising a plurality of probes, wherein the plurality of probes specifically hybridize to the sequence of nucleotide 11 to 30 of a sequence selected from the group consisting of SEQ ID NO:1 to SEQ ID NO:910, and the RNA sequences encoded by a sequence of SEQ ID NO:1 to SEQ ID NO:910, or hybridizing the reverse complements thereof.
